(19) United States
(12) Patent Application Publication
(10) Pub. No.: US 2011/0311550 A1
(43) Pub. Date: Dec. 22, 2011

(54) AGENTS FOR HCV TREATMENT

(75) Inventors: Mansun Law, San Diego, CA (US); Dennis R. Burton, La Jolla, CA (US)

(73) Assignee: The Scripps Research Institute, La Jolla, CA (US)

(21) Appl. No.: 12/998,486

(22) PCT Filed: Oct. 23, 2009
(86) PCT No.: PCT/US2009/005786

§ 371 Date: Jul. 18, 2011

Related U.S. Application Data
(60) Provisional application No. 61/197,292, filed on Oct. 24, 2008.
(60) Provisional application No. 61/200,347, filed on Nov. 26, 2008.

(51) Int. Cl. A61K 39/42; C12N 15/13; A61P 31/14; C12N 1/21; C12N 5/10; C07K 16/10; C12Q 1/70; C12N 15/63

(52) U.S. Cl. 424/161.1; 435/5; 536/23.53; 435/320.1; 435/252.33; 435/339; 530/389.4; 530/387.3

(57) ABSTRACT

Provided are polypeptides, including antibodies and fragments thereof, useful for preventing or treating new or recurring infection of hepatitis C virus, as well as methods of preventing or treating new or recurring hepatitis C viral infection. Also provided are modified E1 and E2 polypeptides.

### RELATED APPLICATIONS

[0001] Benefit of priority is claimed to U.S. Provisional Application Ser. No. 61/197,292, to Mansun Law and Dennis Burton, entitled “AGENTS FOR HCV TREATMENT,” filed Oct. 24, 2008, and U.S. Provisional Application Ser. No. 61/200,347, to Mansun Law and Dennis Burton, entitled “AGENTS FOR HCV TREATMENT,” filed Nov. 26, 2008.

[0002] This application is related to International Application No PCT/US02/02303, to Toshiaki Maruyama, Ian Jones, Dennis Burton, and Robert Fox, entitled “IMMUNOPOLYPEPTIDES TO HEPATITIS C VIRUS,” filed Jan. 25, 2002; U.S. application Ser. No. 12/290,017, to Mansun Law, Toshiaki Maruyama, Dennis Burton, Jonathan Ball and Norman Kneteman, entitled “HCV NEUTRALIZING EPITOPES,” filed Oct. 24, 2008; and International Application No. PCT/US09/05785, to Mansun Law and Dennis Burton, entitled “AGENTS FOR HCV TREATMENT,” filed Oct. 23, 2009, the disclosures of which are specifically incorporated by reference herein in their entireties.

### FIELD OF THE INVENTION

[0003] Provided are polypeptides, including antibodies and fragments thereof, useful for preventing or treating new or recurring infection of hepatitis C virus, as well as methods of preventing or treating new or recurring hepatitis C viral infection. Also provided are modified E1 and E2 polypeptides.

### BACKGROUND

[0004] It is estimated that hepatitis C virus (HCV) infects about 2-3% of the world population, i.e. 120 to 170 million people worldwide. HCV infection predisposes the patient to chronic liver cirrhosis, cancer and liver failure. About 85% of individuals initially infected with HCV become chronically infected. Once established, chronic HCV infection causes an inflammation of the liver, and this can progress to scarring and eventually, liver cirrhosis. Some patients with cirrhosis will go on to develop liver failure or liver cancer. In the United States and Western Europe, the complications of chronic hepatitis and cirrhosis are the most common reasons for liver transplantation. In addition, liver disease caused by HCV is the leading cause of death in patients co-infected with human immunodeficiency virus. Given the large number of infected people worldwide, HCV infection can be a burden on health care systems worldwide.

[0005] Accordingly, there is a need for therapeutic agents and methods for the treatment of new or recurring hepatitis C viral infections.

### SUMMARY

[0006] Provided herein are polypeptides, including antibodies and fragments thereof, that can bind to hepatitis C virus. Thus, provided herein are anti-hepatitis C virus polypeptides and antibodies. Included among the polypeptides provided herein are broadly neutralizing antibodies that can neutralize genetically diverse HCV isolates, targeting different non-overlapping conserved viral epitopes, thereby protecting against hepatitis C virus (HCV) infection. In some examples, the antibodies bind to conformational HCV E1E2 neutralizing epitopes. In other examples, the antibodies bind to conformational E2 neutralizing epitopes. Also provided are antibodies that bind to the same epitope as any of the antibodies provided herein. Also provided are nucleic acids encoding the polypeptides and antibodies, as well as compositions, such as pharmaceutical compositions, containing one or more anti-HCV polypeptides, such as one or more anti-HCV antibodies, or nucleic acids encoding the polypeptides. Such polypeptides, antibodies, nucleic acid molecules and compositions can be used to prevent or treat HCV infection or reduce HCV replication. In one example, a combination of the polypeptides, such as antibodies, including E1E2- and/or E2-specific neutralizing antibodies, can be used to prevent new HCV infections, treat chronic HCV infection, as well as prevent recurrent HCV infection, e.g. following liver transplantation. An antibody combination, for example, can include at least one antibody provided herein that binds specifically with a neutralizing epitope on HCV E1E2 complex and at least one antibody that binds specifically with a neutralizing epitope on HCV E2 polypeptide. Such antibody combinations can be particularly useful for blocking viral entry during the infection process. Thus, also provided are methods of preventing, reducing or treating new or recurring HCV infections or HCV replication.

[0007] Provided herein are polypeptides containing at least one CDR sequence that contains a sequence of amino acids selected from among any set forth in any of SEQ ID NOS: 725-834, 985 and 1090-1133; or a sequence having at least 70%, 80%, 90%, 91%, 92%, 93%, 94%, 95%, 96%, 97%, 98%, 99% or more sequence identity with a sequence of amino acids set forth in any of SEQ ID NOS: 725-834 and 1090-1133, and that, when in an antibody or antigen-binding fragment thereof, the antibody or antigen-binding fragment thereof selectively binds to E1, E1/E2 complex and/or to an HCV virion. In some examples, the polypeptide has two CDR sequences, such as a first CDR (CDR1) with an amino acid sequence set forth in any of SEQ ID NOS: 725-741, 778-796, 985, 1090-1091 and 1101-1113, and a second CDR (CDR2) with an amino acid sequence set forth in any of SEQ ID NOS: 742-759, 797-815, 1092-1096 and 1114-1121. In other examples, the polypeptide has three CDR sequences. In such instances, the CDR1 sequence can have an amino acid sequence set forth in any of SEQ ID NOS: 725-741, 778-796, 985, 1090-1091 or 1101-1113; the CDR2 sequence can have an amino acid sequence set forth in any of SEQ ID NOS: 742-759, 797-815, 1092-1096 and 1114-1121; and the third CDR (CDR3) sequence can have an amino acid sequence set forth in any of SEQ ID NOS: 760-777, 816-834, 1097-1100 and 1122-1133. The CDR1 can be the first CDR from the N-terminal of the polypeptide, followed by the CDR2 and then the CDR3.

[0008] The polypeptides provided herein can contain a framework sequence with a sequence of amino acids set forth in any of SEQ ID NOS:835-982 and 1134-1205. In some examples, the polypeptide contains two framework sequences, wherein the first framework (framework-1) sequence, from the N-terminus of the polypeptide, has a sequence of amino acids set forth in any of SEQ ID NOS: 835-852, 907-925, 1134-1143 and 1165-1173, and the second framework (framework-2) sequence, from the N-terminus of the polypeptide, has a sequence of amino acids set forth in any of SEQ ID NOS: 853-870, 926-944, 1144-1147, and 1174-1181. Also provided are polypeptides that contain three framework regions. For example, the polypeptide can contain a framework-1 sequence, from the N-terminus of the polypeptide, with a sequence of amino acids set forth in any of SEQ ID NOS: 835-852, 907-925, 1134-1143 and 1165-1173; a framework-2 sequence, from the N-terminus of the polypeptide, with a sequence of amino acids set forth in any of SEQ ID NOS: 853-870, 926-944, 1144-1147, and 1174-1181; and a third framework sequence (framework-3), from the N-terminus of the polypeptide, with a sequence of amino acids set forth in any of SEQ ID NOS: 871-888, 945-963, 1148-1156 and 1182-1193. In further examples, the polypeptide contains a fourth framework sequence (framework-4), from the N-terminus of the polypeptide, having a sequence of amino acids set forth in any of SEQ ID NOS: 889-906, 964-982, 1157-1164, and 1194-1205.

[0009] Thus, in some examples, the polypeptide contains three framework sequences and three CDR sequences, wherein the arrangement of the CDR and framework sequences, from the N-terminus of the polypeptide, is framework-1, CDR1, framework-2, CDR2, and framework-3, and wherein the CDR and framework sequences are joined by peptide bonds. In other examples, the polypeptide contains four framework sequences and three CDR sequences, wherein the arrangement of the CDR and framework sequences, from the N-terminus of the polypeptide, is framework-1, CDR1, framework-2, CDR2, framework-3, CDR3, and framework-4, and wherein the CDR and framework sequences are joined by peptide bonds. The first CDR sequence can have a sequence of amino acids set forth in any of SEQ ID NOS: 725-741, 778-796, 985, 1090-1091 and 1101-1113; the second CDR sequence can have a sequence of amino acids set forth in any of SEQ ID NOS: 742-759, 797-815, 1092-1096 and 1114-1121; and the third CDR sequence can have a sequence of amino acids set forth in any of SEQ ID NOS: 725-741, 778-796, 1090-1091 or 1101-1113.

[0010] Provided herein are polypeptides that have a sequence of amino acids set forth in any of SEQ ID NOS: 986-1023, 1062-1089 and 1365. In some examples, the polypeptide is an antibody light chain or antibody heavy chain. Thus, provided herein are antibodies or antigen-binding fragments thereof that contain any of the polypeptides described above. In some examples, the antibody or antigen-binding fragment contains a first and a second polypeptide, which can be covalently linked by at least one disulfide bond. The antibody or antigen-binding fragments can be single-chain Fv (scFv), Fab, Fab′, F(ab′)₂, Fv, dsFv, diabody, Fd or Fd′ fragments. In some examples, the antibody or antigen-binding fragment thereof is an IgG, IgA, IgM, IgD or IgE.

[0011] In particular examples, the antibody or antigen-binding fragment contain one or more CDR(s) on one polypeptide with a sequence of amino acids set forth in any of SEQ ID NOS: 725-777 and 1090-1091, and one or more CDR(s) on the other polypeptide with a sequence of amino acids set forth in any of SEQ ID NOS: 778-834 and 1101-1113. In one example, the antibody or antigen-binding fragment has a polypeptide with a sequence of amino acids set forth in any of SEQ ID NOS: 986-1004 and 1062-1075 and another polypeptide with a sequence of amino acids set forth in any of 1005-1023, 1076-1089 and 1365. For example, provided are antibodies or antigen-binding fragments wherein one polypeptide has an amino acid sequence set forth in SEQ ID NO: 989, and the other polypeptide has an amino acid sequence set forth in SEQ ID NO: 1008; or one polypeptide has an amino acid sequence set forth in SEQ ID NO: 993, and the other polypeptide has an amino acid sequence set forth in SEQ ID NO: 1012, or one polypeptide has an amino acid sequence set forth in SEQ ID NO: 999, and the other polypeptide has an amino acid sequence set forth in SEQ ID NO: 1018, or one polypeptide has an amino acid sequence set forth in SEQ ID NO: 1004, and the other polypeptide has an amino acid sequence set forth in SEQ ID NO: 1023.

[0012] In some aspects, the antibodies or antigen-binding fragments thereof selectively binds to the E1E2 complex of at least one hepatitis C virus. These antibodies can selectively bind to the E1E2 complex of at least one hepatitis C virus and prevent its binding to CD81. In a particular example, the antibody or antigen-binding fragments provided herein selectively binds to an epitope comprising one or more of SEQ ID NOS: 694, 695 and 696. The antibodies or antigen-binding fragments can selectively binds to the E1E2 complex of at least one hepatitis C virus and neutralizes at least one hepatitis C virus, such as HCVpp-H77, HCVpp-J6, or any combination thereof. In some examples, the antibodies neutralizes a hepatitis C virus from genotype 1, 2, 3, 4, 5 or 6 or any subtype thereof, or any combination thereof.

[0013] The antibodies or antigen-binding fragments provided herein can prevent or reduce hepatitis C viral replication in a human liver-chimeric mouse when the antibody is administered to the mouse. The antibody can be administered to the mouse before the mouse is infected with hepatitis C virus. The hepatitis C virus can be genotype 1a and the mouse can be infected by intrajugular venous injection of hepatitis C virus. In some examples, the antibodies prevent or reduce hepatitis C viral replication in a human liver-chimeric mouse when administered to the mouse at about 200 mg/kg, about 24 hours before the mouse is infected with the hepatitis C virus. The hepatitis C viral replication can be indicated by the level of hepatitis C viral RNA in the serum of the human liver-chimeric mouse. In some examples, hepatitis C viral replication is reduced by any amount relative to a control human liver-chimeric mouse that has not been administered the antibody. In a particular example, about 200 mg/kg of the antibody is injected intraperitoneally about 24 hours prior to intrajugular injection of about 2×10⁵ copies of genotype 1a hepatitis C viral RNA and prevents hepatitis C viral replication, and wherein prevention of hepatitis C viral replication is indicated by the absence of serum hepatitis C viral RNA determined by quantitative polymerase chain reaction at six days post intrajugular injection of the hepatitis C viral RNA.

[0014] Provided are antibody or antigen-binding fragments thereof, wherein the antibody or antigen-binding fragment thereof selectively binds to the hepatitis C virus (HCV) E1E2 complex; the antibody or antigen-binding fragment thereof does not bind to a purified E2 polypeptide that is not in an E1E2 complex; and the antibody or antigen-binding fragment thereof does not bind to a linear epitope on the HCV E1 polypeptide. Such antibodies can neutralize at least one isolate of the hepatitis C virus, such as a plurality of hepatitis C virus isolates, such as at least 2, 3, 4, 5 or 6 isolates of hepatitis C virus. The antibodies can neutralize a hepatitis C virus from genotype 1, 2, 3, 4, 5 or 6 or a subtype thereof, and can neutralize hepatitis C virus from two or more genotypes.

[0015] In some examples, the antibody or antigen-binding fragment thereof can compete with an anti-HCV antibody, such as an anti-HCV antibody comprising a heavy chain with a sequence of amino acids set forth in SEQ ID NO:989 and a light chain with a sequence of amino acids set forth in SEQ ID NO:1008; or an anti-HCV antibody comprising a heavy chain with a sequence of amino acids set forth in SEQ ID NO:1004 and a light chain with a sequence of amino acids set forth in SEQ ID NO:1023; wherein at least 70% of the binding of the anti-HCV antibody is inhibited in a competition assay by the antibody or antigen-binding fragment thereof under saturating conditions.

[0016] Where the antibody is an antigen-binding fragment thereof, the fragment can be a single-chain Fv (scFv), Fab, Fab′, F(ab′)₂, Fv, dsFv, diabody, Fd, or a Fd′ fragment. The antibody or antigen-binding fragment thereof contain V_{H} CDRs and/or V_{L} CDRs, such as, for example, a variable heavy chain (V_{H}) complementary determining region 1 (CDR1) with a sequence of amino acids set forth in any of SEQ ID NOS:725-741, 983 and 1090-1091; a V_{H} complementary determining region 2 (CDR2) with a sequence of amino acids set forth in any of SEQ ID NOS:742-759 and 1092-1096; a V_{H} complementary determining region 3 (CDR3) with a sequence of amino acids set forth in any of SEQ ID NOS:760-777 and 1094-1110; a variable light chain (V_{L}) CDR1 with a sequence of amino acids set forth in any of SEQ ID NOS:778-796 and 1101-1113; a V_{L} CDR2 with a sequence of amino acids set forth in any of SEQ ID NOS:797-815 and 1114-1121; and/or a V_{L} CDR3 with a sequence of amino acids set forth in any of SEQ ID NOS:816-834 and 1122-1133. Thus, in some aspects, the antibody or antigen-binding fragment thereof contains a heavy chain, wherein the heavy chain comprises a sequence of amino acids set forth in any of SEQ ID NOS:986-1004 or 1062-1075 and/or contains a light chain, wherein the light chain contains a sequence of amino acids set forth in any of SEQ ID NOS:1005-1023 or 1076-1089.

[0017] Provided herein are antibodies or antigen-binding fragments thereof that selectively binds to the same epitope as that which is selectively bound by any of the antibodies or antigen-binding fragments thereof described above.

[0018] Also provided are compositions, containing an effective amount of the antibody or antigen-binding fragment and a pharmaceutically acceptable carrier. In some examples, the composition also contains an effective amount of at least one additional anti-HCV antibody or antigen-binding fragment, such as any described above. For example, the composition can contain first antibody that selectively binds to an epitope on the hepatitis C virus E2 polypeptide, and a second antibody that selectively binds to the hepatitis C virus E1E2 complex. The epitope on the hepatitis C virus E2 polypeptide can contain three discontinuous amino acid regions of the hepatitis C virus E2 polypeptide, the discontinuous amino acid regions having the sequence: TAGLVGLLTPGAKQNIQLINTNGSWHINS (SEQ ID NO: 694); GWLAGLFYQHKF (SEQ ID NO: 695), and GAPTYSWGANDTDVFVLN (SEQ ID NO: 696); or QLINTNGSWHINS (SEQ ID NO: 1062); GWLAGLFYQHKF (SEQ ID NO: 695), and GAPTYSWGANDTDVFVLN (SEQ ID NO: 696).

[0019] The compositions also can contain an antiviral agent, such as an agent used to treat a mammal infected with a human immunodeficiency virus, a biological stabilizer, such as an anti-coagulant, a preservative, a protease inhibitor, or any combination thereof. The anticoagulant can be citrate, ethylene diamine tetraacetic acid, heparin, oxalate, fluoride or any combination thereof; the preservative can be boric acid, sodium formate or sodium borate; and the protease inhibitor can be dipeptidyl peptidase IV inhibitor. The compositions also can contain a sample from the body of a mammal, wherein one antibody in the composition is present in an amount that is at least about 150 mg of antibody per kg of the sample or at least about 0.15 mg/mL of the sample. In some examples, the sample is a blood product, such as plasma, platelet, leukocytes or stem cell.

[0020] Provided are methods for detecting hepatitis C virus in a sample. Such methods include the steps of contacting the sample with an antibody or antigen-binding fragment provided herein, and determining whether the antibody binds specifically to the sample, wherein the binding of the antibody to the sample indicates that the sample contains a hepatitis C virus. In some examples, determining is effected by detecting complexes of the antibody with a HCV or envelope protein thereof in the sample. The sample can be from a mammal, such as a body fluid or tissue. In some instances, the mammal is a human. The sample can be a fluid sample.

[0021] Also provided are methods for treating or preventing hepatitis C viral infection in a mammal susceptible to infection by a hepatitis C virus, in which an effective amount of an antibody or antigen-binding fragment described above, or a composition described above, is administered to a mammal. In some examples, at least two antibodies or antigen binding fragments thereof are administered. The antibodies can recognize non-overlapping epitopes.

[0022] In the methods herein the antibody or composition can be administered prior to exposure to a hepatitis C virus, such as within 3, 7 or 14 days of exposure to a hepatitis C virus. In other examples, the antibody or composition is administered after exposure to a hepatitis C virus. The antibody or composition administered to the mammal can be administered by intravenous or intraparenteral injection. Typically, the mammal is a human. The methods also can include administering to the mammal a second dose of the antibody or composition at a selected time after the first administration of the antibody or composition. In some examples, the mammal has recurrent hepatitis C viral infection, and/or the mammal is a liver transplantee. In the latter instances, the antibody or composition can be administered at one or more select time points after the transplant, or before and after the transplant. In some examples, the antibody is administered daily for seven days after the transplant; administered every 2 weeks from weeks 2-12 after the transplant, or is administered monthly from twelve weeks after the transplant and onwards. Further, the liver transplant can be infused with the antibody or composition.

[0023] In particular examples, the human also is infected with a human immunodeficiency virus. In such examples, the methods also can contain a step of administering an agent used to treat infection by a human immunodeficiency virus.

[0024] Provided are uses of an antibody or antigen-binding fragment thereof described above or a composition described above, in the preparation of a medicament for treatment or prevention of hepatitis C virus infection. The antibodies or antigen-binding fragments thereof or compositions provided herein can be used to treat or prevent hepatitis C virus infection. In some examples, the hepatitis C virus infection is a recurrent infection. In other examples, the hepatitis C virus infection is a new infection. Further, the subject can be a liver transplantee.

[0025] Provided are articles containing an antibody or antigen-binding fragment thereof or a composition described above and instructions for use of the antibody or composition to prevent or treat infection of a mammal or mammalian cell with a hepatitis C virus. The article can include a vessel for collecting a body fluid. In some examples, at least two antibodies or antigen-binding fragments thereof are included. Such antibodies can recognize non-overlapping epitopes. In some examples, at least one of the antibodies recognizes a conformational epitope of the hepatitis C viral E2 protein that comprises amino acids 396-424; amino acids 436-447, and amino acids 523-540, such as one where the sequence of amino acids 396-424 is TAGLVGLLTPGAKQNIQLINTNGSWHINS (SEQ ID NO: 694); the sequence of amino acids 436-447 is GWLAGLFYQHKF (SEQ ID NO: 695), and the sequence of amino acids 523-540 is GAPTYSWGANDTDVFVLN (SEQ ID NO: 696). In some aspects, at least one of the antibodies recognizes a conformational epitope of the hepatitis C viral E2 protein that comprises amino acids 412-424; amino acids 436-447, and amino acids 523-540. In some examples, the sequence of amino acids 412-424 is QLINTNGSWHINS (SEQ ID NO: 1062); the sequence of amino acids 436-447 is GWLAGLFYQHKF (SEQ ID NO: 695), and the sequence of amino acids 523-540 is GAPTYSWGANDTDVFVLN (SEQ ID NO: 696).

[0026] The vessel can be a collection bag, tube, capillary tube or syringe, and can be evacuated. The article further can contain a biological stabilizer, such as an anti-coagulant, preservative, protease inhibitor, or any combination thereof. The anti-coagulant can be citrate, ethylene diamine tetraacetic acid, heparin, oxalate, fluoride or any combination thereof; the preservative can be boric acid, sodium formate or sodium borate; and the protease inhibitor can be dipeptidyl peptidase IV inhibitor. In some examples, the antibody and/or stabilizer is freeze dried.

[0027] Provided are isolated nucleic acid molecules that encodes a polypeptide or antibody or antigen-binding fragment described above. In some examples, the isolated nucleic molecules contain a sequence of nucleic acids set forth in any of SEQ ID NOS: 1024-1042 or 1043-1061. The nucleic acid molecules can be operably linked to an expression control sequence, such as a viral, phage, bacterial, or mammalian promoter. Also provided are expression vectors containing the nucleic acid molecule, and cells containing the expression vector. In some examples, the cell is a bacterial or mammalian cell, such as Chinese hamster ovary cell or 293 cell.

[0028] Provided are modified E1 polypeptides containing a modification in an E1 polypeptide or variant thereof, wherein the modification is at a position corresponding to position 293, 295, 314, or 316 in an E1 polypeptide with a sequence set forth in SEQ ID NO:1377, with numbering corresponding to the HCV polyprotein set forth in SEQ ID NO:607, or in corresponding residues in a E1 polypeptide. The modification can be an amino acid replacement with any amino acid. In some examples, the modification is selected from among F293A, P295A, T314A and H316A. The modified E1 polypeptides can further contain a further modification at another position in the E1 polypeptide. For example, the modified E1 polypeptide can contain 2, 3, 4, 5, 6 or more modifications. In some examples, the unmodified E1 polypeptide has a sequence of amino acids set forth in any of SEQ ID NOS:1377-1361. In further examples, the modified E1 polypeptide has a sequence of amino acids set forth in any of SEQ ID NOS:1206-1285.

[0029] Provided are E1E2 complexes, containing a modified E1 polypeptide described herein. Also provided are hepatitis C viruses, containing any of the modified E1 polypeptides provided herein. In some examples, such the infectivity of the virus is increased compared to the infectivity of a hepatitis C virus that contains an unmodified E1 polypeptide. The hepatitis C virus can be used, for example, in an assay. Thus, also provided are assays, containing the steps of a) contacting the hepatitis C virus of any of claims 147-149 with an anti-viral agent; and b) contacting cells with the hepatitis C virus.

[0030] Typically, the infectivity f the hepatitis C virus is assessed, an the neutralization of the hepatitis C virus by the anti-viral agent is assessed. The anti-viral agent can be a polypeptide, a peptide, an anti-sense molecule and a small molecule. In some examples, the anti-viral agent is an anti-HCV antibody or fragment thereof. In the assays provided herein, step a) can be performed before step b); step b) can be performed before step a); or steps a) and b) can performed simultaneously. Typically, the cell is a mammalian cell.

[0031] Also provided are nucleic acid molecules that encodes the modified E1 polypeptide; vectors that contain the nucleic acid molecule; and cells that contain the vector. In some examples, the cell is a bacterial cell, a yeast cell or a eukaryotic cell, such as a mammalian cell, such as one selected from among baby hamster kidney cells (BHK-21), 293 cells, Huh7 cells and CHO cells.

[0032] Any feature or combination of features described herein are included within the scope provided that the features included in any such combination are not mutually inconsistent, as will be apparent from the context, this specification and the knowledge of one of ordinary skill in the art. Other features and advantages will be apparent from the following detailed description.

### BRIEF DESCRIPTION OF THE FIGURES

[0033] FIG. 1A-C illustrate properties of anti-HCV E2 Fabs isolated as described herein. FIG. 1A illustrates the specificity of anti-E2 Fabs. The binding of Fabs to GST-E1E2 complex and E2 is compared. The GST-E1E2 fusion protein was captured by a goat anti-GST antibody while soluble E2 and ovalbumin were coated directly onto ELISA plates. Fabs were added to the antigens and subsequently detected with phosphatase-conjugated goat anti-human F(ab)′2 IgG. Recombinant Fabs were produced in cleared lysate of E. coli transformed with the corresponding phagemids. FIG. 1B illustrates competition between MAb AR3A and anti-E2 Fabs. Vaccinia-expressed E1E2 was captured onto ELISA wells by lectin and preincubated with saturating concentration of soluble Fabs before the addition of MAb AR3A. Binding of MAb AR3A was detected with a goat anti-human IgG Fc antibody and the % reduction of binding compared to that in the absence of a Fab is shown. Lightly-shaded bars indicate that Fabs bind E2 better than E1E2; while bars of medium shading indicate that Fabs bind E1E2 better than E2. FIG. 1C illustrates the inhibition of anti-E2 Fab binding to E1E2 by mouse. MAb H53. E1E2 was captured onto ELISA wells in the same manner as shown for FIG. 1B and was pre-incubated with a saturating concentration of MAb H53 before the addition of soluble Fabs. Binding of Fabs was detected with a goat anti-human IgG F(ab)′2 antibody and the % reduction of binding compared to that without MAb H53 is shown. Lightly-shaded bars indicate that Fabs bind E2 better than E1E2; while bars of medium shading indicate that Fabs bind E1E2 better than E2.

[0034] FIG. 2 shows neutralization of HCVpp by human Fabs. Infectivity in Relative Light Units (RLU) is shown for infection of pseudotype virus particles generated with viral Env gene from murine leukemia virus (MLV) (FIG. 2A), H77 (GT 1a) (FIG. 2B), OH8 (GT 1b) (FIG. 2C), CON1 (GT 1b) (FIG. 2D) or J6 (GT 2a) (FIG. 2E) in the presence of 10 μg/mL Fabs. AR1-Fabs: B2, D1 & E; AR2-Fabs: F & G; AR3-Fabs: C1, J2, J3 & L4. Control, anti-HIV gp120 Fab b12; Empty, background infectivity from pseudotype virus generated without Env gene. Dotted lines indicate HCVpp infectivity in the absence of any antibody. Error bars represent SEM calculated from three experiments performed in the same manner.

[0035] FIG. 3 is a schematic diagram of E2 regions important for binding of AR3-specific antibodies. E2 (residues 384-746) is a transmembrane glycoprotein, and a truncated form of E2 (residues 384-661) can be expressed as a soluble protein that retains its ability to bind cell lines expressing HCV receptors and CD81-LEL (Michalak, J. P. et al. J. Gen. Virol. 78, 2299-2306 (1997)). The regions that were investigated by antibody competition (light boxes) and alanine mutagenesis (dark boxes) form the AR3 discontinuous epitopes (dotted boxes). The dotted boxes correspond to (1) amino acids 396-424 having the sequence TAGLVGLLTPGAKQNIQLINTNGSWHINS (SEQ ID NO: 694), (2) amino acids 436-447 having the sequence GWLAGLFYQHKF (SEQ ID NO: 695), and (3) amino acids 523-540 having the sequence GAPTYSWGANDTDVFVLN (SEQ ID NO: 696). The crucial residues in these regions are S424, G523, P525, G530, D535, V538 and N540. The locations of the N-linked glycans are indicated by branched forks. The hypervariable regions (see Troesch, M. et al. Virology 352, 357-367 (2006)) and the transmembrane regions are indicated by the designation HVRs and TM.

[0036] FIG. 4 illustrates the levels of human MAb in human liver-chimeric mice 24 hours post-administration. Human liver-chimeric mice (n=6) were injected intraperitoneally with a dose of 200 mg/kg of the isotype control mAb b6, AR3A or AR3B and blood samples were collected at 24 hours before challenging with a genotype 1a HCV-infected human serum KP (100 μL) by intrajugular venous injection. Intravenous administration of human serum is the most reliable way to assure delivery of human serum but a stressful procedure: 5 of 18 treated mice did not recover after the procedure. Human IgG in mouse sera were quantified as in FIG. 4. Filled bars, mice that died after intrajugular injection of KP serum; Open bars, mice that survived the procedure and were used in the protection experiments. The mean serum human IgG levels±s.d. in the surviving mice of group b6, AR3A and AR3B are 2.5±0.3, 3.1±0.5 and 2.6±0.3 mg/mL, respectively. Note that decay of the human MAbs following virus challenge, which may be an explanation for the infection of several antibody-treated mice at later time points, could not be determined as in FIG. 5 because the infected human serum contains normal human antibodies interfering with IgG quantification. In a control experiment using transplanted mice with low levels of human chimerism, human IgG antibodies were readily detected in the mice challenged with 100 μL of the infected serum (n=5, Day 1 mean±s.d. mouse serum human IgG concentration: 2.6±0.5 mg/mL) (data not shown).

[0037] FIG. 5 demonstrates passive antibody protection against an HCV population. Human liver-chimeric mice (n=6) injected intraperitoneally with 200 mg/kg of the isotype control mAb b6 (left), mAb AR3A (middle) or AR3B (right), were challenged 24 hours later by intrajugular venous injection of genotype 1a HCV-infected human serum (˜2×10⁵ HCV RNA copies). One or two mice per group did not recover from anesthesia after intrajugular injection. Data shown are serum viral load in mice quantified by real-time TaqMan PCR. Owing to morbidity, mice N680 and N672 were killed on days 41 and 45, respectively. IU, international units; ID, identification number; i.p., intraperitoneally; i.v., intravenously. Results indicate the absence of serum HCV RNA 6 days after viral challenge in mice injected with mAb AR3A and mAb AR3B.

[0038] FIG. 6 is a sequence comparison of a viral quasispecies population in the HCV genotype 1a-infected human serum. Partial E2 amino acid sequences (residues 384-622) of a total of 40 clones (represented by KP S9 (SEQ ID NO: 701), KP R14 (SEQ ID NO: 702), KP S6 (SEQ ID NO: 703), KP S18 (SEQ ID NO: 704), KP S16 (SEQ ID NO: 705), KP R8 (SEQ ID NO: 706), KP S20 (SEQ ID NO: 707), KP S4 (SEQ ID NO: 708), KP R3 (SEQ ID NO: 709), KP S3 (SEQ ID NO: 710), KP S12 (SEQ ID NO: 711), KP S15 (SEQ ID NO: 712), KP S5 (SEQ ID NO: 713), KP R7 (SEQ ID NO: 714), KP R11 (SEQ ID NO: 715), KP R1 (SEQ ID NO: 716), KP R12 (SEQ ID NO: 717), KP S7 (SEQ ID NO: 718), KP R15 (SEQ ID NO: 719), KP R18 (SEQ ID NO: 720), KP S11 (SEQ ID NO: 721) and KP R20 (SEQ ID NO: 722)) randomly selected from two independent RT-PCR cloning are shown. The top sequence, clone KP S9, represents the consensus and dominant sequence in this infectious serum. The periods indicate regions of amino acid sequence identity. The frequency of each clone is bracketed. Hypervariable regions (HVRs) are within the dashed-line boxes. Regions important for binding of AR3-antibodies are within the solid-line boxes. The corresponding sequences of isolates H77 (SEQ ID NO: 723) and UKN1b12.16 (SEQ ID NO: 724), sharing 87% and 75% amino acid identity with KP S9, respectively, are shown for comparison.

[0039] FIG. 7 illustrates the results of an analysis of the binding of full-length IgGs of anti-HCV E1E2 antibodies to E1E2 complexes containing E1 polypeptides with N196A, N209A, N234A, N305A or N325A mutations.

[0040] FIG. 8 illustrates the sensitivity of HCVpp containing the E1 mutations F293A, P295A T314A or H316A to neutralization by anti-HCV antibodies C1 IgG, G IgG and N4 IgG. Den3 IgG is an isotype control antibody specific for Dengue virus NS2.

### DETAILED DESCRIPTION

### Outline

[0041] A. Definitions

[0042] B. Hepatitis C Virus
[0043] E1 and E2

[0044] C. Anti-HCV Polypeptides and Antibodies
[0045] 1. Polypeptides
[0046] 2. Anti-HCV antibodies
   [0047] a. General structure of antibodies
      [0048] i. Structural and Functional Domains of Antibodies
      [0049] ii. Antibody Fragments
   [0050] b. Exemplary Anti-HCV antibodies
   [0051] c. Additional modifications of anti-HCV antibodies
      [0052] i. Modifications to reduce immunogenicity
      [0053] ii. Fc modifications
      [0054] iii. Pegylation
      [0055] iv. Conjugation of a detectable moiety
      [0056] v. Conjugation of a therapeutic moiety
      [0057] vi. Modifications to improve binding specificity
[0058] 3. Methods For Producing Anti-HCV Polypeptides and antibodies
   [0059] a. Nucleic acids
   [0060] b. Vectors
   [0061] c. Cell Expression Systems
      [0062] i. Prokaryotic Expression
      [0063] ii. Yeast Cells
      [0064] iii. Insect cells
      [0065] iv. Mammalian cells
      [0066] v. Plants
   [0067] d. Purification
   [0068] e. Additional methods for producing antibodies
[0069] 4. Assessing anti-HCV antibodies
   [0070] a. Binding assays
   [0071] b. In vitro assays for analyzing virus neutralization effects of antibodies
   [0072] c. In vivo Animal models
[0073] 5. Uses for anti-HCV Polypeptides and Antibodies
[0074] 6. Pharmaceutical Compositions
[0075] 7. Miscellaneous Compositions and Articles of Manufacture

[0076] D. Modified E1 and E2 polypeptide
[0077] 1. Exemplary E1 modifications
[0078] 2. Exemplary E2 modifications
[0079] 3. Production of the modified E1 and E2 polypeptides
   [0080] a. Nucleic acids encoding modified E1 and/or E2
   [0081] b. Vectors and Expression systems
   [0082] c. Purification and assessment
[0083] 4. Uses for the modified E1 and E2 polypeptides.
[0084] 5. Articles of manufacture and kits

[0085] E. EXAMPLES

### DEFINITIONS

[0086] Unless defined otherwise, all technical and scientific terms used herein have the same meaning as is commonly understood by one of skill in the art to which the invention(s) belong. All patents, patent applications, published applications and publications, Genbank sequences, databases, websites and other published materials referred to throughout the entire disclosure herein, unless noted otherwise, are incorporated by reference in their entirety. In the event that there are a plurality of definitions for terms herein, those in this section prevail. Where reference is made to a URL or other such identifier or address, it is understood that such identifiers can change and particular information on the internet can come and go, but equivalent information can be found by searching the internet. Reference thereto evidences the availability and public dissemination of such information.

[0087] As used herein, the term “hepatitis C virus,” “HCV,” or “HCVs” includes different viral genotypes, subtypes, quasispecies and isolates. It includes any noncytopathic RNA virus that has a single and positive-stranded RNA genome belonging to the Hepacivirus genus of the Flaviviridae family. The term includes different isolates of HCV such as, without limitation, those having polyprotein sequences and accession numbers shown above, as well as any others in the NCBI database. Examples of different genotypes encompassed by this term include, without limitation, genotype 1, 2, 3, 4, 5 and 6, as described in Simmonds et al. (Hepatology 42:962-973). Reference to HCV also includes those of any additional genotypes that are established. Examples of different subtypes include, without limitation, 1a, 1b, 1c, 2a, 2b, 2c, 2i, 2k, 3a, 3b, 3k, 4a, 4d, 4f, 5a, 6a, 6b, 6c, 6d, 6e, 6f, 6g, 6h, 6i, 6j, 6k, 6l, 6m, 6n, 6o, 6q, 6p and 6t. The term also includes cell culture HCVs (HCVcc) and pseudotype HCVs (HCVpp), as well as HCV quasispecies. Various HCVs are described by Simmonds P. in Genetic diversity and evolution of hepatitis C virus—15 years on, J Gen Virol 85:3173-3188 (2004) and Simmonds et al. in Consensus proposals for a unified system of nomenclature of hepatitis C virus genotypes, Hepatology 42:962-973 (2005). HCV nucleotide sequences are known in the art. For example, see Viral Bioinfomatics Research Center (hcvdb.org) and the Hepatitis C Virus database (hcv.lanl.gov/).

[0088] As used herein, the term “polypeptide” refers to a polymer composed of three or more naturally-occurring or non-naturally occurring amino acid residues of the L or D configuration, regardless of post-translational modification. The terms “polypeptide” and “protein” are used interchangeably herein.

[0089] As used herein, a “peptide” refers to a polypeptide that is from 2 to about or 40 amino acids in length.

[0090] As used herein, an “amino acid” is an organic compound containing an amino group and a carboxylic acid group. A polypeptide contains two or more amino acids. For purposes herein, amino acids contained in the antibodies provided include the twenty naturally-occurring amino acids (Table 1), non-natural amino acids, and amino acid analogs (e.g., amino acids wherein the α-carbon has a side chain). As used herein, the amino acids, which occur in the various amino acid sequences of polypeptides appearing herein, are identified according to their well-known, three-letter or one-letter abbreviations (see Table 1). The nucleotides, which occur in the various nucleic acid molecules and fragments, are designated with the standard single-letter designations used routinely in the art.

[0091] As used herein, “amino acid residue” refers to an amino acid formed upon chemical digestion (hydrolysis) of a polypeptide at its peptide linkages. The amino acid residues described herein are generally in the “L” isomeric form. Residues in the “D” isomeric form can be substituted for any L-amino acid residue, as long as the desired functional property is retained by the polypeptide. NH₂ refers to the free amino group present at the amino terminus of a polypeptide. COOH refers to the free carboxy group present at the carboxyl terminus of a polypeptide. In keeping with standard polypeptide nomenclature described in J. Biol. Chem., 243:3557-59 (1968) and adopted at 37 C.F.R. §§1.821-1.822, abbreviations for amino acid residues are shown in Table 1:

TABLE 1
Table of Correspondence

SYMBOL

| 1-Letter | 3-Letter | AMINO ACID |
|---|---|---|
| Y | Tyr | Tyrosine |
| G | Gly | Glycine |
| F | Phe | Phenylalanine |
| M | Met | Methionine |
| A | Ala | Alanine |
| S | Ser | Serine |
| I | Ile | Isoleucine |
| L | Leu | Leucine |
| T | Thr | Threonine |
| V | Val | Valine |
| P | Pro | Proline |
| K | Lys | Lysine |
| H | His | Histidine |
| Q | Gln | Glutamine |
| E | Glu | Glutamic acid |
| Z | Glx | Glutamic Acid and/or |
| | | Glutamine |
| W | Trp | Tryptophan |
| R | Arg | Arginine |
| D | Asp | Aspartic acid |
| N | Asn | Asparagine |
| B | Asx | Aspartic Acid and/or |
| | | Asparagine |
| C | Cys | Cysteine |
| X | Xaa | Unknown or other |

[0092] All sequences of amino acid residues represented herein by a formula have a left to right orientation in the conventional direction of amino-terminus to carboxyl-terminus. In addition, the phrase “amino acid residue” is defined to include the amino acids listed in the Table of Correspondence (Table 1), modified, non-natural and unusual amino acids. Furthermore, a dash at the beginning or end of an amino acid residue sequence indicates a peptide bond to a further sequence of one or more amino acid residues or to an amino-terminal group such as NH₂ or to a carboxyl-terminal group such as COOH.

[0093] In a peptide or protein, suitable conservative substitutions of amino acids are known to those of skill in this art and generally can be made without altering a biological activity of a resulting molecule. Those of skill in this art recognize that, in general, single amino acid substitutions in non-essential regions of a polypeptide do not substantially alter biological activity (see, e.g., Watson et al., Molecular Biology of the Gene, 4th Edition, 1987, The Benjamin/Cummings Pub. co., p. 224).

[0094] Such substitutions can be made in accordance with those set forth in Table 2 as follows:

TABLE 2

| Original residue | Conservative substitution |
|---|---|
| Ala (A) | Gly; Ser |
| Arg (R) | Lys |
| Asn (N) | Gln; His |
| Cys (C) | Ser |
| Gln (Q) | Asn |
| Glu (E) | Asp |
| Gly (G) | Ala; Pro |
| His (H) | Asn; Gln |
| Ile (I) | Leu; Val |
| Leu (L) | Ile; Val |
| Lys (K) | Arg; Gln; Glu |
| Met (M) | Leu; Tyr; Ile |
| Phe (F) | Met; Leu; Tyr |
| Ser (S) | Thr |
| Thr (T) | Ser |
| Trp (W) | Tyr |
| Tyr (Y) | Trp; Phe |
| Val (V) | Ile; Leu |

[0095] Other substitutions also are permissible and can be determined empirically or in accord with other known conservative or non-conservative substitutions.

[0096] As used herein, “naturally occurring amino acids” refer to the 20 L-amino acids that occur in polypeptides.

[0097] As used herein, the term “non-natural amino acid” refers to an organic compound that has a structure similar to a natural amino acid but has been modified structurally to mimic the structure and reactivity of a natural amino acid. Non-naturally occurring amino acids thus include, for example, amino acids or analogs of amino acids other than the 20 naturally occurring amino acids and include, but are not limited to, the D-isostereomers of amino acids. Exemplary non-natural amino acids are known to those of skill in the art, and include, but are not limited to, 2-Aminoadipic acid (Aad), 3-Aminoadipic acid (Baad), β-alanine/β-Amino-propionic acid (Bala), 2-Aminobutyric acid (Abu), 4-Aminobutyric acid/piperidinic acid (4Abu), 6-Aminocaproic acid (Acp), 2-Aminoheptanoic acid (Ahe), 2-Aminoisobutyric acid (Aib), 3-Aminoisobutyric acid (Baib), 2-Aminopimelic acid (Apm), 2,4-Diaminobutyric acid (Dbu), Desmosine (Des), 2,2′-Diaminopimelic acid (Dpm), 2,3-Diaminopropionic acid (Dpr), N-Ethylglycine (EtGly), N-Ethylasparagine (EtAsn), Hydroxylysine (Hyl), allo-Hydroxylysine (Ahyl), 3-Hydroxyproline (3Hyp), 4-Hydroxyproline (4Hyp), Isodesmosine (Ide), allo-Isoleucine (Aile), N-Methylglycine, sarcosine (MeGly), N-Methylisoleucine (MeIle), 6-N-Methyllysine (MeLys), N-Methylvaline (MeVal), Norvaline (Nva), Norleucine (Nle), Ornithine (Orn).

[0098] As used herein, “antibody” refers to a full-length immunoglobulin molecule or an immunologically-active fragment of an immunoglobulin molecule such as the Fab or F(ab′)₂ fragment generated by, for example, cleavage of the antibody with an enzyme such as pepsin or co-expression of an antibody light chain and an antibody heavy chain in bacteria, yeast, insect cell or mammalian cell. The antibodies provided herein can be generated using one or more polypeptides provided herein that form a structure resembling a Fab, bivalent F(ab′)₂, IgG, IgD, IgA, IgE or IgM and is capable of selectively binding to HCV or an HCV antigen. Typically, the antibodies provided herein are anti-HCV antibodies that immunoreacts with epitopes on the E2 glycoprotein or the E1E2 complex of HCV, i.e. selectively binds with these epitopes on the HCV. In some instances, the anti-HCV antibodies neutralize the virus.

[0099] The term “antibody” is used in the broadest sense, and specifically covers monoclonal antibodies (including full length monoclonal antibodies), polyclonal antibodies, multispecific antibodies (e.g., bispecific antibodies), and antibody fragments (e.g., Fab, F(ab′)2, Fd and Fv) so long as they exhibit the desired biological activity.

[0100] The term “variable” in the context of variable region of antibodies, refers to the fact that certain portions of the variable regions differ extensively in sequence among antibodies and are used in the binding and specificity of each particular antibody for its particular antigen. The variability is concentrated in three segments (a triplet) called complementarity determining regions (CDRs) also known as hypervariable regions both in the light chain and the heavy chain variable regions. There are at least two techniques for determining CDRs: (1) an approach based on cross-species sequence variability (i.e., Kabat et al., Sequences of Proteins of Immunological Interest (National Institute of Health, Bethesda, Md. 1987); and (2) an approach based on crystallographic studies of antigen-antibody complexes (Chothia, C. et al. (1989), Nature 342: 877).

[0101] The more highly conserved portions of variable regions are called the framework (FR). The variable domains of native heavy and light chains each comprise three FR regions, largely adopting a β-sheet configuration, connected by three CDRs, which form loops connecting, and in some cases forming part of, the β-sheet structure. The CDRs in each chain are held together in close proximity by the FR regions and, with the CDRs from the other chain, contribute to the formation of the antigen binding site of antibodies (see Kabat et al.) The constant regions are not involved directly in binding an antibody to an antigen, but exhibit various effector function, such as participation of the antibody in antibody-dependent cellular toxicity.

[0102] A “species-dependent antibody,” e.g., a mammalian anti-human IgE antibody, is an antibody which has a stronger binding affinity for an antigen from a first mammalian species than it has for a homologue of that antigen from a second mammalian species. Normally, the species-dependent antibody “bind specifically” to a human antigen (i.e., has a binding affinity (Kd) value of no more than about 1×10⁻⁷ M, preferably no more than about 1×10⁻⁸ and most preferably no more than about 1×10⁻⁹ M) but has a binding affinity for a homologue of the antigen from a second non-human mammalian species which is at least about 50 fold, or at least about 500 fold, or at least about 1000 fold, weaker than its binding affinity for the human antigen. The species-dependent antibody can be of any of the various types of antibodies as defined above, but preferably is a humanized or human antibody.

[0103] The term “antibody variation” refers to an amino acid sequence variant of an antibody wherein one or more of the amino acid residues have been modified. Such mutant necessarily have less than 100% sequence identity or similarity with the amino acid sequence having at least 75% amino acid sequence identity or similarity with the amino acid sequence of either the heavy or light chain variable domain of the antibody, more preferably at least 80%, more preferably at least 85%, more preferably at least 90%, and most preferably at least 95%.

[0104] The term “antibody fragment” refers to a portion of a full-length antibody, generally the antigen binding or variable region. Examples of antibody fragments include Fab, Fab′, F(ab′)2, Fd and Fv fragments. Papain digestion of antibodies produces two identical antigen binding fragments, called the Fab fragment, each with a single antigen binding site, and a residual “Fc” fragment, so-called for its ability to crystallize readily. Pepsin treatment yields an F(ab′)2 fragment that has two antigen binding fragments which are capable of crosslinking antigen, and a residual other fragment (which is termed pFc′). Additional fragments can include diabodies, linear antibodies, single-chain antibody molecules, and multispecific antibodies formed from antibody fragments. As used herein, “functional fragment” with respect to antibodies, refers to Fv, F(ab) and F(ab′)2 and Fd fragments.

[0105] As used herein, an antigen-binding fragment refers to an antibody fragment that contains an antigen-binding portion that binds to the same antigen as the antibody from which the antibody fragment is derived. An antigen-binding fragment, as used herein, includes any antibody fragment that when inserted into an antibody framework (such as by replacing a corresponding region) results in an antibody that immunospecifically binds (i.e. exhibits Ka of at least or at least about 10⁷-10⁸ M⁻¹) to the antigen. Antigen-binding fragments include, antibody fragments, such as Fab fragments, Fab′ fragments, F(ab′)2 fragments, Fv fragments, disulfide-linked Fvs (dsFv), Fd fragments, Fd′ fragments, single-chain Fvs (scFv), single-chain Fabs (scFab), and also includes other fragments, such as CDR-containing fragments, and polypeptides that immunospecifically bind to an antigen or that when inserted into an antibody framework results in an antibody that immunospecifically binds to the antigen.

[0106] An “Fv” fragment is the minimum antibody fragment which contains a complete antigen recognition and binding site. This region consists of a dimer of one heavy and one light chain variable domain in a tight, non-covalent association (VH-VL dimer). It is in this configuration that the three CDRs of each variable region interact to define an antigen binding site on the surface of the VH-VL dimer. Collectively, the six CDRs confer antigen binding specificity to the antibody. However, even a single variable region (or half of an Fv comprising only three CDRs specific for an antigen) has the ability to recognize and bind antigen, although at a lower affinity than the entire binding site.

[0107] The Fab fragment (also designated as F(ab)) also contains the constant region of the light chain and the first constant region (CH1) of the heavy chain. Fab′ fragments differ from Fab fragments by the addition of a few residues at the carboxyl terminus of the heavy chain CH1 domain including one or more cysteines from the antibody hinge region. Fab′-SH is the designation herein for Fab′ in which the cysteine residue(s) of the constant regions have a free thiol group. F(ab′) fragments are produced by cleavage of the disulfide bond at the hinge cysteines of the F(ab′)2 pepsin digestion product. Additional chemical couplings of antibody fragments are known to those of ordinary skill in the art.

[0108] The light chains of antibodies (immunoglobulin) from any vertebrate species can be assigned to one of two clearly distinct types, called kappa (κ) and lambda (λ), based on the amino acid sequences of their constant domain.

[0109] Depending on the amino acid sequences of the constant domain of their heavy chains, “immunoglobulins” can be assigned to different classes. There are at least five (5) major classes of immunoglobulins: IgA, IgD, IgE, IgG and IgM, and several of these may be further divided into subclasses (isotypes), e.g. IgG-1, IgG-2, IgG-3 and IgG4; IgA-1 and IgA-2. The heavy chains constant domains that correspond to the different classes of immunoglobulins are called α, δ, ε, γ and μ, respectively. The subunit structures and three-dimensional configurations of different classes of immunoglobulins are well known.

[0110] The term “monoclonal antibody” as used herein refers to an antibody obtained from a population of substantially homogeneous antibodies, i.e., the individual antibodies composed of the population are identical except for possible naturally occurring mutations that may be present in minor amounts. Monoclonal antibodies are highly specific, being directed against a single antigenic site. Furthermore, in contrast to conventional (polyclonal) antibody preparations which typically include different antibodies directed against different determinants (epitopes), each monoclonal antibody is directed against a single determinant on the antigen. In additional to their specificity, the monoclonal antibodies are advantageous in that they are synthesized by hybridoma or phage infected bacterial culture, uncontaminated by other immunoglobulins. The modifier “monoclonal” indicates the character of the antibody as being obtained from a substantially homogeneous population of antibodies, and is not to be construed as requiring production of the antibody by any particular method. For example, the monoclonal antibodies may be made by the hybridoma method first described by Kohler and Milstein, Nature 256, 495 (1975), or may be made by recombinant methods, e.g., as described in U.S. Pat. No. 4,816,567. The monoclonal antibodies also can be isolated from phage antibody libraries using the techniques described in Clackson et al. Nature 352: 624-628 (1991), as well as in Marks et al., J. Mol. Biol. 222: 581-597 (1991).

[0111] The antibody subclasses including monoclonal antibodies, fragments and single chains thereof include “chimeric” forms in which a portion of the heavy and/or light chain is identical with or homologous to corresponding sequences in antibodies derived from a particular species or belonging to a particular antibody class or subclass, while the remainder of the chain(s) is identical with or homologous to corresponding sequences in antibodies derived from another species or belonging to another antibody class or subclass, as well as fragments of such antibodies, so long as they exhibit the desired biological activity (U.S. Pat. No. 4,816,567); Morrison et al. Proc. Natl. Acad. Sci. 81, 6851-6855 (1984).

[0112] The antibody subclasses also include fully human forms in which the entire sequence is derived from human immunoglobulins (recipient antibody) including the complementary determining region (CDR) of the polypeptide In some instances, Fv framework residues of the human immunoglobulin are replaced by corresponding non-human residues. Furthermore, a polypeptide can include residues which are found neither in a human immunoglobulin nor in a non-human mammalian sequence.

[0113] “Single-chain Fv” or “scFv” antibody fragments include the VH and VL regions of an antibody, wherein these regions are present in a single polypeptide chain. Generally, the Fv polypeptide further includes an polypeptide linker between the VH and VL regions which enables the scFv to form the desired structure for antigen binding. For a review of sFv see Pluckthun in The Pharmacology of Monoclonal Antibodies, vol. 113, Rosenburg and Moore eds. Springer-Verlag, New York, pp. 269-315 (1994).

[0114] The term “diabodies” refers to a small antibody fragments with two antigen-binding sites, which fragments comprise a heavy chain variable region (VH) connected to a light chain variable domain (VL) in the same polypeptide chain (VH-VL). By using a linker that is too short to allow pairing between the two domains on the same chain, the domains are forced to pair with the complementary domains of another chain and create two antigen-binding sites. Diabodies are described more fully in, for example, EP 404,097; WO 93/11161, and Holliger et al., Proc. Natl. Acad. Sci. USA 90: 6444-6448 (1993).

[0115] The phrase “functional fragment or analog” of an antibody is a compound having qualitative biological activity in common with a full-length antibody. For example, a functional fragment or analog of an anti-IgG antibody is one which can bind to an IgG immunoglobulin in such a manner so as to prevent or substantially reduce the ability of such molecule from having the ability to bind to the high affinity receptor, Fc gamma receptor.

[0116] The term “variants” refers to substitutional, insertional and/or deletional variants. “Substitutional” variants are those that have at least one amino acid residue in a native sequence removed and a different amino acid inserted in its place at the same position. The substitutions may be single, where only one amino acid in the molecule as been substituted, or they may be multiple, where two or more amino acids have been substituted in the same molecule. “Insertional” variants are those with one or more amino acids inserted immediately adjacent to an amino acid at a particular position in a native sequence. Immediately adjacent to an amino acid means connected to either the alpha-carboxyl or alpha-amino functional group of the amino acid. “Deletional” variants are those with one or more amino acids in the native amino acid sequence removed. Ordinarily, deletional variants will have one or two amino acids deleted in a particular region of the molecule.

[0117] As used herein, the term “bind selectively” or “selectively binds,” in reference to a polypeptide or an antibody provided herein, means that the polypeptide or antibody binds with a selected epitope without substantially binding to another epitope. Typically, an antibody or fragment thereof that selectively binds to a selected epitope specifically binds to the epitope, such as with an affinity constant Ka of about or 1×10⁷M⁻¹ or 1×10⁸M⁻¹ or greater, as defined below.

[0118] As used herein, “specifically binds” or “immunospecifically binds,” with respect to an antibody or antigen-binding fragment thereof are used interchangeably herein and refer to the ability of the antibody or antigen-binding fragment to form one or more noncovalent bonds with a cognate antigen, by noncovalent interactions between the antibody combining site(s) of the antibody and the antigen. The antigen can be an isolated antigen or presented in a virus. Typically, an antibody that specifically binds to a virus antigen or virus is one that binds to the virus antigen (or to the antigen in the virus or to the virus) with an affinity constant Ka of about or 1×10⁷M⁻¹ or 1×10⁸M⁻¹ or greater (or a dissociation constant (IQ) of 1×10⁻⁷ M or 1×10⁻⁸ M or less). Affinity constants can be determined by standard kinetic methodology for antibody reactions, for example, immunoassays, surface plasmon resonance (SPR) (Rich and Myszka (2000) Curr. Opin. Biotechnol 11:54; Englebienne (1998) Analyst. 123:1599), isothermal titration calorimetry (ITC) or other kinetic interaction assays known in the art (see, e.g., Paul, ed., Fundamental Immunology, 2nd ed., Raven Press, New York, pages 332-336 (1989); see also U.S. Pat. No. 7,229,619 for a description of exemplary SPR and ITC methods for calculating the binding affinity of anti-HCV antibodies). Instrumentation and methods for real time detection and monitoring of binding rates are known and are commercially available (e.g., BiaCore 2000, Biacore AB, Upsala, Sweden and GE Healthcare Life Sciences; Malmqvist (2000) Biochem. Soc. Trans. 27:335). An antibody that specifically binds to a virus antigen (or virus) can bind to other peptides, polypeptides, or proteins or viruses with equal or lower binding affinity. Typically, an antibody or antigen-binding fragment thereof provided herein that binds specifically to a HCV E2 protein does not cross-react with other antigens or cross reacts with substantially (at least 10-100 fold) lower affinity for such antigens. Similarly, an antibody or antigen-binding fragment thereof provided herein that binds specifically to a HCV E1E2 complex does not cross-react with other antigens or cross reacts with substantially (at least 10-100 fold) lower affinity for such antigens. An antibody or antigen-binding fragment thereof provided herein that binds selectively to E2 typically also binds to the E1E2 complex. Antibodies or antigen-binding fragments that selectively binds to a particular virus antigen (e.g. a HCV E2 or E1E2) can be identified, for example, by immunoassays, such as radioimmunoassays (RIA), enzyme-linked immunosorbent assays (ELISAs), surface plasmon resonance, or other techniques known to those of skill in the art. An antibody or antigen-binding fragment thereof that specifically binds to an epitope on a HCV E2 or E1E2 typically is one that binds to the epitope (presented in the protein or virus) with a higher binding affinity than to any cross-reactive epitope as determined using experimental techniques, such as, but not limited to, immunoassays, surface plasmon resonance, or other techniques known to those of skill in the art. Specifically binding to an isolated HCV protein (i.e., a recombinantly produced protein), such as HCV E1E2, does not necessarily mean that the antibody will exhibit the same immunospecific binding and/or neutralization of the virus. Such measurements and properties are distinct. The affinity for the antibody or antigen-binding fragments for the virus or the antigen as presented in the virus can be determined. For purposes herein, when describing an affinity or related term, the target, such as the isolated protein or the virus, will be identified.

[0119] As used herein, the term “epitope” refers to any antigenic determinant on an antigen to which the paratope of an antibody binds, and is made up of one or more segments of amino acids. An epitope can be a linear or conformational epitope, and can be continuous or discontinuous. Typically, linear epitopes are continuous, i.e. made up of one continuous stretch of amino acids. Conformational epitopes can be discontinuous i.e. made up of two or more discontinuous segments of amino acids that come together to form an epitope when the antigen is folded. Methods for determining whether antibodies binds to the same epitope are known in the art. Epitopes can be defined or mapped by standard methods well known in art. For example, epitopes can be mapped using assays, such as ELISA assays, utilizing peptide libraries or site-directed mutagenesis of the antigen (such as alanine-scanning of the antigen).

[0120] As used herein, “binds to the same epitope” with reference to two or more antibodies means that the antibodies compete for binding to an antigen and bind to the same, overlapping or encompassing continuous or discontinuous segments of amino acids. Those of skill in the art understand that the phrase “binds to the same epitope” does not necessarily mean that the antibodies bind to exactly the same amino acids. The precise amino acids to which the antibodies bind can differ. For example, a first antibody can bind to a segment of amino acids that is completely encompassed by the segment of amino acids bound by a second antibody. In another example, a first antibody binds one or more segments of amino acids that significantly overlap the one or more segments bound by the second antibody. For the purposes herein, such antibodies are considered to “bind to the same epitope.”

[0121] Antibody competition assays can be used to determine whether an antibody “binds to the same epitope” as another antibody. Such assays are well known in the art and are described herein (see. e.g. Examples 1-4). Typically, competition of 70% or more, such as 70%, 71%, 72%, 73%, 74%, 75%, 80%, 85%, 90%, 95% or more, of an antibody known to interact with the epitope by a second antibody under conditions in which the second antibody is in excess and the first saturates all sites, is indicative that the antibodies “bind to the same epitope.” To assess the level of competition between two antibodies, for example, radioimmunoassays or assays using other labels for the antibodies, such as biotin (see, e.g., Example 1) can be used. For example, an HCV antigen, such as the E1E2 complex, can be incubated with a saturating amount of a first anti-HCV antibody or antigen-binding fragment thereof conjugated to a labeled compound (e.g., ³H, ¹²⁵I or biotin) in the presence of the same amount of a second unlabeled anti-HCV antibody. The amount of labeled antibody that is bound to the antigen in the presence of the unlabeled blocking antibody is then assessed and compared to binding in the absence of the unlabeled blocking antibody. Competition is determined by the percentage change in binding signals in the presence of the unlabeled blocking antibody compared to the absence of the blocking antibody. Thus, if there is a 70% inhibition of binding of the labeled antibody in the presence of the blocking antibody compared to binding in the absence of the blocking antibody, then there is competition between the two antibodies of 70%. Thus, reference to competition between a first and second antibody of 70% or more, such as 70%, 71%, 72%, 73%, 74%, 75%, 80%, 85%, 90%, 95% or more, means that the first antibody inhibits binding of the second antibody (or vice versa) to the antigen by 70%, 71%, 72%, 73%, 74%, 75%, 80%, 85%, 90%, 95% or more (compared to binding of the antigen by the second antibody in the absence of the first antibody). Thus, inhibition of binding of a first antibody to an antigen by a second antibody of 70%, 71%, 72%, 73%, 74%, 75%, 80%, 85%, 90%, 95% or more indicates that the two antibodies bind to the same epitope.

[0122] The term “neutralize,” as used herein in reference to a polypeptide or antibody described herein, means that the polypeptide or antibody can prevent or reduce HCV infection or replication. Neutralization can be assessed using methods well known in art and described herein, such as the neutralization of binding assays described in the examples, below, and by assessing HCV replication in in vivo animal models following administration of the polypeptide or antibody being tested. In some examples, binding or replication is reduced by 10%, 20%, 30%, 40%, 50%, 60%, 70%, 80%, 90%, 95%, 96%, 97% or more.

[0123] The term “reduce,” as used herein in reference to HCV infection or replication, means a decrease in the amount of HCV ribose nucleic acids (RNA) in a sample. HCV infection or replication is indicated by the amount of HCV RNA detected in a sample from a source (cell culture or animal) that has been exposed to HCV and is susceptible to HCV infection. Whether a polypeptide or antibody will bind selectively to HCV and neutralize it can be determined using methods known in the art, as well as the methods described herein, including determining the level of HCV RNA or detecting reduction of signals from a reporter gene encoded by the virus such as, for example, the relative light unit (RLU) for luciferase or the mean fluorescence intensity (MFI) of green fluorescent protein (GFP).

[0124] As used herein, the term “prevent,” “preventing” or “prevention” refers to use in a prophylactic manner, i.e. prevention of the occurrence of symptoms and/or their underlying cause. The terms “treat,” “treating” and “treatment,” as used herein, refer to reducing the severity and/or frequency of symptoms, eliminating the symptoms and/or underlying cause or improving or remediating damage associated with the infection. The term “reduce” or “reduction” means a decrease in any amount, for example, a decrease of 5%, 10%, 20%, 40%, 50%, 60%, 70% or more than 70%.

[0125] As used herein, the term “nucleic acid” refers to a polymer of deoxynucleic ribose nucleic acids (DNA), as well as ribose nucleic acids (RNA). The term includes linear molecules, as well as covalently closed circular molecules. It includes single stranded molecules, as well as double stranded molecules.

[0126] As used herein, the wild-type form of a polypeptide or nucleic acid molecule is a form encoded by a gene or by a coding sequence encoded by the gene. Typically, a wild-type form of a gene, or molecule encoded thereby, does not contain mutations or other modifications that alter function or structure. The term wild-type also encompasses forms with allelic variation as occurs among and between species. As used herein, a predominant form of a polypeptide or nucleic acid molecule refers to a form of the molecule that is the major form produced from a gene.

[0127] As used herein, “species variants” refer to variants in polypeptides among different species, including different mammalian species, such as mouse and human, and species of microorganisms, such as viruses and bacteria.

[0128] The term “isolated,” as used herein with reference to a nucleic acid molecule, means that the nucleic acid molecule is free of unrelated nucleic acid sequences, i.e. nucleic acid sequences encoding other genes or those involved in the expression of such other genes, that flank it's 5′ and 3′ ends in the naturally-occurring genome of the organism from which the nucleic acid is derived. Accordingly, an “isolated nucleic acid” has a structure that is different from that of any naturally occurring nucleic acid or to that of any fragment of a naturally occurring genomic nucleic acid spanning more than three separate genes. Thus, the term “isolated nucleic acid molecule” includes, for example, (1) a DNA molecule that has the sequence of part of a naturally occurring genomic DNA molecule, but is not flanked by both of the coding sequences that flank that part of the molecule in the genome of the organism in which it naturally occurs; (2) a nucleic acid incorporated into a vector or into the genomic DNA of a prokaryote or eukaryote in a manner such that the resulting molecule is not identical to any naturally-occurring vector or genomic DNA; (3) a separate molecule such as a cDNA, a genomic fragment, a fragment produced by polymerase chain reaction (PCR), or a restriction fragment; and (4) a recombinant nucleotide sequence that is part of a hybrid gene, i.e. a gene encoding a fusion protein. Specifically excluded from this definition are nucleic acids present in mixtures of (1) DNA molecules, (2) transfected cells, and (3) cell clones, e.g., as these occur in a DNA library such as a cDNA or genomic DNA library.

[0129] As used herein, the term “operably linked” means that a nucleic acid and an expression control sequence is positioned in such a way that the expression control sequence directs expression of the nucleic acid when the appropriate molecules such as transcriptional activator proteins are bound to the expression control sequence.

[0130] As used herein, the phrase “expression control sequence” means a nucleic acid sequence sufficient to direct transcription of another nucleic acid sequence that is operably linked to the expression control sequence to produce an RNA transcript when appropriate molecules such as transcriptional activator proteins are bound to the expression control sequence.

[0131] As used herein, the phrase “expression vector” means a nucleic acid molecule capable of transporting and/or allowing for the expression of another nucleic acid to which it has been linked. The product of that expression is referred to as a messenger ribose nucleic acid (mRNA) transcript. Thus, expression vectors contain appropriate expression control sequences that may direct expression of a nucleic acid that is operably linked to the expression control sequence to produce a transcript. Typically, the nucleic acid encoding the polypeptide is operably linked to an expression control sequence such as a promoter, e.g. a phage, viral, bacterial or mammalian promoter.

[0132] The phrase “substantially identical” with respect to an antibody or polypeptide sequence means an antibody or polypeptide sequence exhibiting at least 70%, preferably 80%, more preferably 90% and most preferably 95% sequence identity to the reference antibody or polypeptide sequence. The term with respect to a nucleic acid sequence means a sequence of nucleotides exhibiting at least about 85%, preferably 90%, more preferably 95% and most preferably 97% sequence identity to the reference nucleic acid sequence. For polypeptides, the length of the comparison sequences will generally be at least 25 amino acids. For nucleic acids, the length will generally be at least 75 nucleotides.

[0133] The term “identity” or “homology” means the percentage of amino acid residues in the candidate sequence that are identical with the residue of a corresponding sequence to which it is compared, after aligning the sequences and introducing gaps, if necessary to achieve the maximum percent identity for the entire sequence, and not considering any conservative substitutions as part of the sequence identity. Neither N- or C-terminal extensions nor insertions shall be construed as reducing identity or homology. Methods and computer programs for the alignment are well known in the art. Sequence identity may be measured using sequence analysis software (e.g., Sequence Analysis Software Package, Genetics Computer Group, University of Wisconsin Biotechnology Center, 1710 University Ave., Madison, Wis. 53705). This software matches similar sequences by assigning degrees of homology to various substitutions, deletions, and other modifications.

[0134] The terms “cell”, “cell line” and “cell culture” are used interchangeably, and all such designations include progeny. It is also understood that all progeny may not be precisely identical in DNA content, due to deliberate or inadvertent mutations. Mutant progeny that have the same function or biological property, as screened for in the originally transformed cell, are included.

[0135] The “host cells” generally are prokaryotic or eukaryotic hosts.

[0136] “Transformation” means introducing DNA into an organism so that the DNA is replicable, either as an extrachromosomal element or by chromosomal integration.

[0137] “Transfection” refers to the taking up of an expression vector by a host cell whether or not any coding sequences are in fact expressed.

[0138] The terms “transfected host cell” and “transformed” refer to the introduction of DNA into a cell. The cell is termed “host cell” and it may be either prokaryotic or eukaryotic. Typical prokaryotic host cells include various strains of E. coli. Typical eukaryotic host cells are mammalian, such as Chinese hamster ovary or cells of human origin. The introduced DNA sequence may be from the same species as the host cell of a different species from the host cell, or it may be a hybrid DNA sequence, containing some foreign and some homologous DNA.

[0139] The terms “replicable expression vector” and “expression vector” refer to a piece of DNA, usually double-stranded, which may have inserted into it a piece of foreign DNA. Foreign DNA is defined as heterologous DNA, which is DNA not naturally found in the host cell. The vector is used to transport the foreign or heterologous DNA into a suitable host cell. Once in the host cell, the vector can replicate independently of the host chromosomal DNA and several copies of the vector and its inserted (foreign) DNA may be generated.

[0140] The term “vector” means a DNA construct containing a DNA sequence which is operably linked to a suitable control sequence capable of effecting the expression of the DNA in a suitable host. Such control sequences include a promoter to effect transcription, an optional operator sequence to control such transcription, a sequence encoding suitable mRNA ribosome binding sites, and sequences which control the termination of transcription and translation. The vector may be a plasmid, a phage particle, or simply a potential genomic insert. Once transformed into a suitable host, the vector may replicate and function independently of the host genome, or may in some instances, integrate into the genome itself. “Phage” and “vector” sometimes are used interchangeably herein, as the phage is the form of vector. However, the term vector is intended to include such other form of vectors which serve equivalent function as and which are, or become, known in the art. Typical expression vectors for bacterial expression and mammalian cell culture expression, for example, are based on pRK5 (EP 307,247), pSV16B (WO 91/08291) and pVL1392 (Pharmingen).

[0141] The expression “control sequences” refers to DNA sequences necessary for the expression of an operably linked coding sequence in a particular host organism. The control sequences that are suitable for prokaryotes, for example, include a promoter, optionally an operator sequence, and a ribosome binding site. Eukaryotic cells are known to utilize promoters, polyadenylation signals, and enhancers.

[0142] As used herein, the term “nucleic acid” refers to at least two linked nucleotides or nucleotide derivatives, including a deoxyribonucleic acid (DNA) and a ribonucleic acid (RNA), joined together, typically by phosphodiester linkages. Also included in the term “nucleic acid” are analogs of nucleic acids such as peptide nucleic acid (PNA), phosphorothioate DNA, and other such analogs and derivatives or combinations thereof. Nucleic acids also include DNA and RNA derivatives containing, for example, a nucleotide analog or a “backbone” bond other than a phosphodiester bond, for example, a phosphotriester bond, a phosphoramidate bond, a phosphorothioate bond, a thioester bond, or a peptide bond (peptide nucleic acid). The term also includes, as equivalents, derivatives, variants and analogs of either RNA or DNA made from nucleotide analogs, single (sense or antisense) and double-stranded nucleic acids. Deoxyribonucleotides include deoxyadenosine, deoxycytidine, deoxyguanosine and deoxythymidine. For RNA, the uracil base is uridine.

[0143] Nucleic acids can contain nucleotide analogs, including, for example, mass modified nucleotides, which allow for mass differentiation of nucleic acid molecules; nucleotides containing a detectable label such as a fluorescent, radioactive, luminescent or chemiluminescent label, which allow for detection of a nucleic acid molecule; or nucleotides containing a reactive group such as biotin or a thiol group, which facilitates immobilization of a nucleic acid molecule to a solid support. A nucleic acid also can contain one or more backbone bonds that are selectively cleavable, for example, chemically, enzymatically or photolytically cleavable. For example, a nucleic acid can include one or more deoxyribonucleotides, followed by one or more ribonucleotides, which can be followed by one or more deoxyribonucleotides, such a sequence being cleavable at the ribonucleotide sequence by base hydrolysis. A nucleic acid also can contain one or more bonds that are relatively resistant to cleavage, for example, a chimeric oligonucleotide primer, which can include nucleotides linked by peptide nucleic acid bonds and at least one nucleotide at the 3′ end, which is linked by a phosphodiester bond or other suitable bond, and is capable of being extended by a polymerase. Peptide nucleic acid sequences can be prepared using well-known methods (see, for example, Weiler et al. (1997) Nucleic Acids Res. 25:2792-2799).

[0144] As used herein, the terms “polynucleotide” and “nucleic acid molecule” refer to an oligomer or polymer containing at least two linked nucleotides or nucleotide derivatives, including a deoxyribonucleic acid (DNA) and a ribonucleic acid (RNA), joined together, typically by phosphodiester linkages. Polynucleotides also include DNA and RNA derivatives containing, for example, a nucleotide analog or a “backbone” bond other than a phosphodiester bond, for example, a phosphotriester bond, a phosphoramidate bond, a phosphorothioate bond, a thioester bond, or a peptide bond (peptide nucleic acid). Polynucleotides (nucleic acid molecules), include single-stranded and/or double-stranded polynucleotides, such as deoxyribonucleic acid (DNA), and ribonucleic acid (RNA) as well as analogs or derivatives of either RNA or DNA. The term also includes, as equivalents, derivatives, variants and analogs of either RNA or DNA made from nucleotide analogs, single (sense or antisense) and double-stranded polynucleotides. Deoxyribonucleotides include deoxyadenosine, deoxycytidine, deoxyguanosine and deoxythymidine. For RNA, the uracil base is uridine. Polynucleotides can contain nucleotide analogs, including, for example, mass modified nucleotides, which allow for mass differentiation of polynucleotides; nucleotides containing a detectable label such as a fluorescent, radioactive, luminescent or chemiluminescent label, which allow for detection of a polynucleotide; or nucleotides containing a reactive group such as biotin or a thiol group, which facilitates immobilization of a polynucleotide to a solid support. A polynucleotide also can contain one or more backbone bonds that are selectively cleavable, for example, chemically, enzymatically or photolytically cleavable. For example, a polynucleotide can include one or more deoxyribonucleotides, followed by one or more ribonucleotides, which can be followed by one or more deoxyribonucleotides, such a sequence being cleavable at the ribonucleotide sequence by base hydrolysis. A polynucleotide also can contain one or more bonds that are relatively resistant to cleavage, for example, a chimeric oligonucleotide primer, which can include nucleotides linked by peptide nucleic acid bonds and at least one nucleotide at the 3′ end, which is linked by a phosphodiester bond or other suitable bond, and is capable of being extended by a polymerase. Peptide nucleic acid sequences can be prepared using well-known methods (see, for example, Weiler et al. (1997) Nucleic Acids Res. 25:2792-2799). Exemplary of the nucleic acid molecules (polynucleotides) provided herein are oligonucleotides, including synthetic oligonucleotides, oligonucleotide duplexes, primers, including fill-in primers, and oligonucleotide duplex cassettes.

[0145] An “isolated” nucleotide is a nucleic acid molecule that is identified and separated from at least one contaminant nucleic acid molecule with which it is ordinarily associated in the natural source of the antibody nucleic acid. An isolated nucleic acid molecule is other than in the form or setting in which it is found in nature. Isolated nucleic acid molecules therefore are distinguishable from the nucleic acid molecule as it exists in natural cells. However, an isolated nucleic acid molecule includes a nucleic acid molecule contained in cells that ordinarily express the antibody where, for example, the nucleic acid molecule is in a chromosomal location different from that of natural cells.

[0146] A nucleotide is “operably linked” when it is placed into a functional relationship with another nucleic acid sequence. This can be a gene and a regulatory sequence(s) which are connected in such a way as to permit gene expression when the appropriate molecules (e.g., transcriptional activator proteins) are bound to the regulatory sequences(s). For example, DNA for a presequence or secretory leader is operably linked to DNA for a polypeptide if it is expressed as a preprotein that participates in the secretion of the polypeptide; a promoter or enhancer is operably linked to a coding sequence if it affects the transcription of the sequence; or a ribosome binding site is operably linked to a coding sequence if it affects the transcription of the sequence; or a ribosome binding site is operably linked to a coding sequence if it is positioned so as to facilitate translation. Generally, “operably linked” means that the DNA sequences being linked are contiguous, and, in the case of a secretory leader, contiguous and in reading phase. However, enhancers do not have to be contiguous. Linking is accomplished by ligation at convenient restriction sites. If such sites do not exist, the synthetic oligonucleotide adaptors or linkers are used in accordance with conventional practice.

[0147] As used herein, “E1” refers to an envelope glycoprotein on hepatitis C virus. The E1 polypeptide is located in the HCV polyprotein immediately after the core protein at amino acid residues corresponding to residues 192-383 of the HCV genotype 1a, H77 isolate polyprotein set forth in SEQ ID NO:607. Exemplary amino acid sequences of E1 polypeptides are set forth in SEQ ID NOS:1377-1361. Reference to an E1 polypeptide includes isolated E1 polypeptides and E1 polypeptides in an E1E2 complex. Reference to an E1 polypeptide also includes truncated forms thereof, such as soluble forms that are truncated at their C-terminal to remove the transmembrane domain, that retain a property, such as a binding property, and variants, such as those from different HCV isolates and quasispecies, including polypeptides that have at least 40%, 45%, 50%, 55%, 65%, 70%, 75%, 80%, 85%, 90%, 95%, 96%, 97%, 98%, 99% or more sequence identity to the E1 polypeptide from HCV genotype 1a, isolate H77, set forth in SEQ ID NO: 1337. Included are modified E1 polypeptides, such as those set forth in any of SEQ ID NOS: 1206-1284 and variants thereof.

[0148] E1 polypeptides include synthetic molecules prepared by translation of nucleic acids, proteins generated by chemical synthesis, such as syntheses that include ligation of shorter polypeptides, through recombinant methods, proteins isolated from HCV-infected human and non-human tissue and cells, chimeric E1 polypeptides and modified forms thereof. E1 polypeptides also include fragments or portions of E1 that are of sufficient length or include appropriate regions to retain at least one property of a full-length E1 polypeptide, such as the ability to form a complex with E2 that, when on a viral particle, can bind to host cells, or the ability to bind to anti-E1 or E1E2 antibodies. E1 polypeptides also include those that contain chemical or posttranslational modifications and those that do not contain chemical or posttranslational modifications. Such modifications include, but are not limited to, pegylation, albumination, glycosylation, farnysylation, carboxylation, hydroxylation, phosphorylation, and other polypeptide modifications known in the art.

[0149] As used herein, “E2” refers to an envelope glycoprotein on hepatitis C virus. The E2 polypeptide is located in the HCV polyprotein immediately after the E1 polypeptide at amino acid residues corresponding to residues 384-746 of the HCV genotype 1a, H77 isolate polyprotein set forth in SEQ ID NO:607. Exemplary amino acid sequences of E2 polypeptides are set forth in SEQ ID NOS:1312-1336. Reference to an E2 polypeptide includes isolated E2 polypeptides and E2 polypeptides in an E1E2 complex. Reference to an E2 polypeptide also includes truncated forms thereof, such as soluble forms that are truncated at their C-terminal to remove the transmembrane domain, that retain a property, such as a binding property, and variants, such as those from different HCV isolates and quasispecies, including polypeptides that have at least 40%, 45%, 50%, 55%, 65%, 70%, 75%, 80%, 85%, 90%, 95%, 96%, 97%, 98%, 99% or more sequence identity to the E2 polypeptide from HCV genotype 1a, isolate H77, set forth in SEQ ID NO: 1312. Included are modified E2 polypeptides, such as those set forth in any of SEQ ID NOS: 1286-1311 and variants thereof.

[0150] E2 polypeptides include synthetic molecules prepared by translation of nucleic acids, proteins generated by chemical synthesis, such as syntheses that include ligation of shorter polypeptides, through recombinant methods, proteins isolated from HCV-infected human and non-human tissue and cells, chimeric E2 polypeptides and modified forms thereof. E2 polypeptides also include fragments or portions of E2 that are of sufficient length or include appropriate regions to retain at least one property of a full-length E2 polypeptide, such as the ability to bind to anti-E2 antibodies. E2 polypeptides also include those that contain chemical or posttranslational modifications and those that do not contain chemical or posttranslational modifications. Such modifications include, but are not limited to, pegylation, albumination, glycosylation, farnysylation, carboxylation, hydroxylation, phosphorylation, and other polypeptide modifications known in the art.

[0151] Reference to an amino acid position in any of the mature, processed HCV proteins, such as E1 or E2, is made with numbering relative to the full length HCV polypeptide, such as that set forth in SEQ ID NO:607, and not with reference to the mature polypeptide. Thus, for example, reference to amino acid position 192 in the E1 polypeptide from HCV genotype 1a, isolate H77 corresponds to position 1 of the mature E1 polypeptide set forth in SEQ ID NO:1337. Similarly, reference to amino acid position 425 in the E2 polypeptide from HCV genotype 1a, isolate H77 corresponds to position 42 of the mature E2 polypeptide set forth in SEQ ID NO:1312.

[0152] As used herein, corresponding residues refers to residues that occur at aligned loci. Related or variant polypeptides are aligned by any method known to those of skill in the art. Such methods typically maximize matches, and include methods such as using manual alignments and by using the numerous alignment programs available (for example, BLASTP) and others known to those of skill in the art. By aligning the sequences of polypeptides, one skilled in the art can identify corresponding residues, using conserved and identical amino acid residues as guides. For example, by aligning the sequences of E2 polypeptides from different HCV isolates, one of skill in the art can identify corresponding residues, using conserved and identical amino acid residues as guides. Corresponding positions also can be based on structural alignments, for example by using computer simulated alignments of protein structure. In other instances, corresponding regions can be identified.

[0153] As used herein, a “modification” is in reference to modification of a sequence of amino acids of a polypeptide or a sequence of nucleotides in a nucleic acid molecule and includes deletions, insertions, and replacements of amino acids and nucleotides, respectively. Methods of modifying a polypeptide are routine to those of skill in the art, such as by using recombinant DNA methodologies.

[0154] As used herein, “deletion,” when referring to a nucleic acid or polypeptide sequence, refers to the deletion of one or more nucleotides or amino acids compared to a sequence, such as a target polynucleotide or polypeptide or a native or wild-type sequence.

[0155] As used herein, “insertion” when referring to a nucleic acid or amino acid sequence, describes the inclusion of one or more additional nucleotides or amino acids, within a target, native, wild-type or other related sequence. Thus, a nucleic acid molecule that contains one or more insertions compared to a wild-type sequence, contains one or more additional nucleotides within the linear length of the sequence. As used herein, “additions,” to nucleic acid and amino acid sequences describe addition of nucleotides or amino acids onto either termini compared to another sequence.

[0156] As used herein, “substitution” refers to the replacing of one or more nucleotides or amino acids in a native, target, wild-type or other nucleic acid or polypeptide sequence with an alternative nucleotide or amino acid, without changing the length (as described in numbers of residues) of the molecule. Thus, one or more substitutions in a molecule does not change the number of amino acid residues or nucleotides of the molecule. Substitution mutations compared to a particular polypeptide can be expressed in terms of the number of the amino acid residue along the length of the polypeptide sequence. For example, a modified polypeptide having a modification in the amino acid at the 19^{th} position of the amino acid sequence that is a substitution of Isoleucine (Ile; I) for cysteine (Cys; C) can be expressed as I19C, Ile19C, or simply C19, to indicate that the amino acid at the modified 19^{th} position is a cysteine. In this example, the molecule having the substitution has a modification at Ile 19 of the unmodified polypeptide.

[0157] “Treatment” refers to both therapeutic treatment and prophylactic or preventative measures. Those in need of treatment include those already with the disorder as well as those in which the disorder is to be prevented.

[0158] A “disorder” is any condition that would benefit from treatment with the polypeptide. This includes chronic and acute disorders or diseases including those pathological conditions which predispose the mammal to the disorder in question.

[0159] “Mammal” for purposes of treatment refers to any animal classified as a mammal, including human, domestic and farm animals, nonhuman primates, and zoo, sports, or pet animals, such as dogs, horses, cats, cows, etc.

[0160] The word “label” when used herein refers to a detectable compound or composition which is conjugated directly or indirectly to the antibody. The label may itself be detectable (e.g., radioisotope labels or fluorescent labels) or, in the case of an enzymatic label, may catalyze chemical alteration of a substrate compound or composition which is detectable.

[0161] As used herein, “solid phase” means a non-aqueous matrix to which the antibody can adhere. Example of solid phases encompassed herein include those formed partially or entirely of glass (e.g. controlled pore glass), polysaccharides (e.g., agarose), polyacrylamides, polystyrene, polyvinyl alcohol and silicones. In certain embodiments, depending on the context, the solid phase can comprise the well of an assay plate; in others it is a purification column (e.g. an affinity chromatography column). This term also includes a discontinuous solid phase of discrete particles, such as those described in U.S. Pat. No. 4,275,149.

[0162] As used herein, “affinity maturation using phage display” (AMPD) refers to a process described in Lowman et al., Biochemistry 30(45): 10832-10838 (1991), see also Hawkins et al., J. Mol. Biol. 226, 889-896 (1992). While not strictly limited to the following description, this process can be described briefly as: several hypervariable region sites (e.g. 6-7 sites) are mutated to generate all possible amino acid substitutions at each site. The antibody mutants thus generated are displayed in a monovalent fashion from filamentous phage particles as fusions to the gene III product of M13 packaged within each particle. The phage expressing the various mutants can be cycled through rounds of binding selection, followed by isolation and sequencing of those mutants which display specific immuno-binding, preferably high affinity binding. The method is also described in WO 92/09690, issued Jun. 11, 1992. A modified procedure involving pooled affinity display is described in Cunningham, B. C. et al., EMBO J. 13(11), 2508-2515 (1994).

[0163] As used herein, the term “phage library” refers to the phage library used in the affinity maturation process described above and in Hawkins et al., J. Mol. Biol. 226: 889-896 (1992), and in Lowman et al., Biochemistry 30(45): 10832-10838 (1991). Each library includes a variable region (e.g. 6-7 sites) for which all possible amino acid substitutions are generated. The antibody mutants thus generated are displayed in a monovalent fashion from filamentous phage particles as fusions to the gene III product of M13 packaged within each particle and expressed on the exterior of the phage.

[0164] As used herein, “high affinity” means an affinity constant (Kd) of at least 10⁻⁷ M, and especially preferably at least 10⁻¹⁰ M under physiological conditions.

[0165] By “pharmaceutically acceptable” it is meant a carrier, diluent, excipient, and/or salt that is compatible with the other ingredients of the formulation, and not deleterious to the recipient thereof, for example, a buffered aqueous, oil or organic medium containing optional stabilizing agents and adjuvants for stimulation of immune binding.

### B. HEPATITIS C VIRUS

[0166] Hepatitis C virus (HCV) is a noncytopathic, positive-stranded RNA virus that causes acute and chronic hepatitis and hepatocellular carcinoma (Hoofnagle, J. H. (2002) Hepatology 36, S21-29). The hepatocyte is the primary target cell, although various lymphoid populations, especially B cells and dendritic cells also can be infected at lower levels (Kanto et al. (1999) J. Immunol. 162, 5584-5591; Auffermann-Gretzinger et al. (2001) Blood 97, 3171-3176; Hiasa et al. (1998) Biochem. Biophys. Res. Commun. 249, 90-95). A striking feature of HCV infection is its tendency towards chronicity with at least 70% of acute infections progressing to persistence (Hoofnagle, J. H. (2002) Hepatology 36, S21-29). HCV chronicity is often associated with significant liver disease, including chronic active hepatitis, cirrhosis and hepatocellular carcinoma (Alter, H. J. & Seeff, L. B. (2000) Semin. Liver Dis. 20, 17-35). With over 170 million people currently infected, HCV represents a growing public health concern.

[0167] The single stranded HCV RNA genome contains a 9.6 kb positive strand RNA genome composed of a 5′ non coding region (NCR), a single open reading frame (ORF) encoding a large polyprotein, and a 3′-NCR. The polyprotein has about 3010-3033 amino acids (Q.-L. Choo, et al. Proc. Natl. Acad. Sci. USA 88, 2451-2455 (1991); N. Kato et al., Proc. Natl. Acad. Sci. USA 87, 9524-9528 (1990); A. Takamizawa et al., J. Virol. 65, 1105-1113 (1991)). Nucleic acid and amino acid sequences for different isolates of HCV can be found in the art, for example, in the National Center for Biotechnology Information (NCBI) database.

[0168] An example of an HCV subtype 1a is strain H77. Its polyprotein sequence (Genbank ID AAB66324) is as follows:

| (SEQ ID NO: 607) | |
|---|---|
| 1 | MSTNPKPQRK TKRNTNRRPQ DVKFPGGGQI VGGVYLLPRR GPRLGVRATR |
| | KTSERSQPRG |
| 61 | RRQPIPKARR PEGRTWAQPG YPWPLYGNEG CGWAGWLLSP RGSRPSWGPT |
| | DPRRRSRNLG |
| 121 | KVIDTLTCGF ADLMGYIPLV GAPLGGAARA LAHGVRVLED GVNYATGNLP |
| | GCSFSIFLLA |
| 181 | LLSCLTVPAS AYQVRNSSGL YHVTNDCPNS SIVYEAADAI LHTPGCVPCV |
| | REGNASRCWV |
| 241 | AVTPTVATRD GKLPTTQLRR HIDLLVGSAT LCSALYVGDL CGSVFLVGQL |
| | FTFSPRRHWT |
| 301 | TQDCNCSIYP GHITGHRMAW DMMMNWSPTA ALVVAQLLRI PQAIMDMIAG |
| | AHWGVLAGIA |
| 361 | YFSMVGNWAK VLVVLLLFAG VDAETHVTGG SAGRTTAGLV GLLTPGAKQN |
| | IQLINTNGSW |
| 421 | HINSTALNCN ESLNTGWLAG LFYQHKFNSS GCPERLASCR RLTDFAQGWG |
| | PISYANGSGL |
| 481 | DERPYCWHYP PRPCGIVPAK SVCGPVYCFT PSPVVVGTTD RSGAPTYSWG |
| | ANDTDVFVLN |
| 541 | NTRPPLGNWF GCTWMNSTGF TKVCGAPPCV IGGVGNNTLL CPTDCFRKHP |
| | EATYSRCGSG |
| 601 | PWITPRCMVD YPYRLWHYPC TINYTIFKVR MYVGGVEHRL EAACNWTRGE |
| | RCDLEDRDRS |
| 661 | ELSPLLLSTT QWQVLPCSFT TLPALSTGLI HLHQNIVDVQ YLYGVGSSIA |
| | SWAIKWEYVV |
| 721 | LLFLLLADAR VCSCLWMMLL ISQAEAALEN LVILNAASLA GTHGLVSFLV |
| | FFCFAWYLKG |
| 781 | RWVPGAVYAF YGMWPLLLLL LALPQRAYAL DTEVAASCGG VVLVGLMALT |
| | LSPYYKRYIS |
| 841 | WCMWWLQYFL TRVEAQLHVW VPPLNVRGGR DAVILLMCVV HPTLVFDITK |
| | LLLAIFGPLW |
| 901 | ILQASLLKVP YFVRVQGLLR ICALARKIAG GHYVQMAIIK LGALTGTYVY |
| | NHLTPLRDWA |
| 961 | HNGLRDLAVA VEPVVFSRME TKLITWGADT AACGDIINGL PVSARRGQEI |
| | LLGPADGMVS |
| 1021 | KGWRLLAPIT AYAQQTRGLL GCIITSLTGR DKNQVEGEVQ IVSTATQTFL |
| | ATCINGVCWT |
| 1081 | VYHGAGTRTI ASPKGPVIQM YTNVDQDLVG WPAPQGSRSL TPCTCGSSDL |
| | YLVTRHADVI |
| 1141 | PVRRRGDSRG SLLSPRPISY LKGSSGGPLL CPAGHAVGLF RAAVCTRGVA |
| | KAVDFIPVEN |
| 1201 | LETTMRSPVF TDNSSPPAVP QSFQVAHLHA PTGSGKSTKV PAAYAAQGYK |
| | VLVLNPSVAA |
| 1261 | TLGFGAYMSK AHGVDPNIRT GVRTITTGSP ITYSTYGKFL ADGGCSGGAY |
| | DIIICDECHS |
| 1321 | TDATSILGIG TVLDQAETAG ARLVVLATAT PPGSVTVSHP NIEEVALSTT |
| | GEIPFYGKAI |
| 1381 | PLEVIKGGRH LIFCHSKKKC DELAAKLVAL GINAVAYYRG LDVSVIPTSG |
| | DVVVVSTDAL |
| 1441 | MTGFTGDFDS VIDCNTCVTQ TVDFSLDPTF TIETTTLPQD AVSRTQRRGR |
| | TGRGKPGIYR |
| 1501 | FVAPGERPSG MFDSSVLCEC YDAGCAWYEL TPAETTVRLR AYMNTPGLPV |
| | CQDHLEFWEG |
| 1561 | VFTGLTHIDA HFLSQTKQSG ENFPYLVAYQ ATVCARAQAP PPSWDQMWKC |
| | LIRLKPTLHG |
| 1621 | PTPLLYRLGA VQNEVTLTHP ITKYIMTCMS ADLEVVTSTW VLVGGVLAAL |
| | AAYCLSTGCV |
| 1681 | VIVGRIVLSG KPAIIPDREV LYQEFDEMEE CSQHLPYIEQ GMMLAEQFKQ |
| | KALGLLQTAS |
| 1741 | RQAEVITPAV QTNWQKLEVF WAKHMWNFIS GIQYLAGLST LPGNPAIASL |
| | MAFTAAVTSP |
| 1801 | LTTGQTLLFN ILGGWVAAQL AAPGAATAFV GAGLAGAAIG SVGLGKVLVD |
| | ILAGYGAGVA |
| 1861 | GALVAFKIMS GEVPSTEDLV NLLPAILSPG ALVVGVVCAA ILRRHVGPGE |
| | GAVQWMNRLI |
| 1921 | AFASRGNHVS PTHYVPESDA AARVTAILSS LTVTQLLRRL HQWISSECTT |
| | PCSGSWLRDI |
| 1981 | WDWICEVLSD FKTWLKAKLM PQLPGIPFVS CQRGYRGVWR GDGIMHTRCH |
| | CGAEITGHVK |
| 2041 | NGTMRIVGPR TCRNMWSGTF PINAYTTGPC TPLPAPNYKF ALWRVSAEEY |
| | VEIRRVGDFH |
| 2101 | YVSGMTTDNL KCPCQIPSPE FFTELDGVRL HRFAPPCKPL LREEVSFRVG |
| | LHEYPVGSQL |
| 2161 | PCEPEPDVAV LTSMLTDPSH ITAEAAGRRL ARGSPPSMAS SSASQLSAPS |
| | LKATCTANHD |
| 2221 | SPDAELIEAN LLWRQEMGGN ITRVESENKV VILDSFDPLV AEEDEREVSV |
| | PAEILRKSRR |
| 2281 | FARALPVWAR PDYNPPLVET WKKPDYEPPV VHGCPLPPPR SPPVPPPRKK |
| | RTVVLTESTL |
| 2341 | STALAELATK SFGSSSTSGI TGDNTTTSSE PAPSGCPPDS DVESYSSMPP |
| | LEGEPGDPDL |
| 2401 | SDGSWSTVSS GADTEDVVCC SMSYSWTGAL VTPCAAEEQK LPINALSNSL |
| | LRHHNLVYST |
| 2461 | TSRSACQRQK KVTFDRLQVL DSHYQDVLKE VKAAASKVKA NLLSVEEACS |
| | LTPPHSAKSK |
| 2521 | FGYGAKDVRC HARKAVAHIN SVWKDLLEDS VTPIDTTIMA KNEVFCVQPE |
| | KGGRKPARLI |
| 2581 | VFPDLGVRVC EKMALYDVVS KLPLAVMGSS YGFQYSPGQR VEFLVQAWKS |
| | KKTPMGFSYD |
| 2641 | TRCFDSTVTE SDIRTEEAIY QCCDLDPQAR VAIKSLTERL YVGGPLTNSR |
| | GENCGYRRCR |
| 2701 | ASGVLTTSCG NTLTCYIKAR AACRAAGLQD CTMLVCGDDL VVICESAGVQ |
| | EDAASLRAFT |
| 2761 | EAMTRYSAPP GDPPQPEYDL ELITSCSSNV SVAHDGAGKR VYYLTRDPTT |
| | PLARAAWETA |
| 2821 | RHTPVNSWLG NIIMFAPTLW ARMILMTHFF SVLIARDQLE QALNCEIYGA |
| | CYSIEPLDLP |
| 2881 | PIIQRLHGLS AFSLHSYSPG EINRVAACLR KLGVPPLRAW RHRAHCVRAR |
| | LLSRGGRAAI |
| 2941 | CGKYLFNWAV RTKLKLTPIA AAGRLDLSGW FTAGYSGGDI YHSVSHARPR |
| | WFWFCLLLLA |
| 3001 | AGVGIYLLPN R |

[0169] An example of an HCV subtype 1b is strain HCV-L2, which can be found in the NCBI database as accession number U01214 (gi 437107). Its polyprotein sequence (AAA75355) is as follows:

| (SEQ ID NO: 608) | |
|---|---|
| 1 | MSTNPKPQRK TKRNTNRRPQ DVKFPGGGQI VGGVYLLPRR GPRLGVRATR |
| | KTSERSQPRG |
| 61 | RRQPIPKARQ PEGRAWAQPG YPWPLYANEG LGWAGWLLSP RGSRPSWGPT |
| | DPRRRSRNLG |
| 121 | KVIDTPTCGF ADLMGYIPLV GAPLGGVARA LAHGVRVLED SVNYATGNLP |
| | GCSFSIFLLA |
| 181 | LLSCLTVPAS AYEVRNVSGI YHVTNDCSNS SIVYEAADLI MHTPGCVPCV |
| | REANSSRCWV |
| 241 | ALTPTLAARD SSIPTATIRR HVDLLVGAAA FCSAMYVGDL CGSVFLVSQL |
| | FTFSPRLHQT |
| 301 | VQDCNCSIYP GHLTGHRMAW DMMMNWSPTA ALVVSQLLRI PQAIVDMVAG |
| | AHWGVLAGLA |
| 361 | YYPMVGNWAK VLIVMLLFAG VDGTTVTMGG TVARTTYGFT GLFRPGASQK |
| | IQLINTNGSW |
| 421 | HINRTALNCN DSLNTGFLAA LFYTHRFNAS GCPERMASCQ SIDKFVQGWG |
| | PITYAENGSS |
| 481 | DQRPYCWHYA PRRCGIVPAS QVCGPVYCFT PSPVVVGTTD RSGAPTYSWG |
| | ENETDVLLLN |
| 541 | NTRPPQGNWF GCTWMSSTGF TKTCGGPPCN IGGAGNNTLT CPTDCFRKHP |
| | EATYTKCGSG |
| 601 | PWLTPRCLVD YPYRLWHYPC TVNFTTFKVR MYVGGVEHRL IAACNWTRGE |
| | RCNLEDRDRS |
| 661 | ELSPLLLSTT EWQILPCSYT TLPALSTGLI HLHQNIVDVQ YLYGIGSAVV |
| | SFVIKWEYVL |
| 721 | LFFLLLADAR VCACLWMILL IAQAEAALEN LVVLNAASVA GAHGILSFLV |
| | FFCAAWYIKG |
| 781 | RLVPGAAYAS YGVWPLLLLL LALPPRAYAM DQGMAASSGG TVLVGLMLLT |
| | LSPYYKVVLA |
| 841 | RLIWWLQYFI TRAEAHLQVW VPPLNVRGGR DAVILLTCAV YPELVFDITK |
| | LLLAIFGPLM |
| 901 | VLQAGIIKMP YFVRAQGLIR ACMLVRKVAG GHYVQMAFMK LAALTGTYVY |
| | DHLTPLRDWA |
| 961 | HTGLRDLAVA VEPVVFSDME TKIITWGADT AECGDIILGY RSSARRGREI |
| | LLGPADSLEG |
| 1021 | QGWRLLAPIT AYAQQTRGLL GCIITSLTGR DKNQVEGEVQ VVSTATQSFL |
| | ATCVNGVCWT |
| 1081 | VFHGAGSKTL AGPKGPITQM YTNVDQDLVG WQAAPGMRSL TPCTCGSSDL |
| | YLVTRHADVI |
| 1141 | PVRRRGDGRG SLLSPRPVSY LKGSSGGPLL WPSGHAVGIF RAAVCTRGVA |
| | KAVDFVPVES |
| 1201 | METTMRSPVF TDNSSPPAVP QTFQVAHLHA PTGSGKSTKV PAAYAAQGYK |
| | VLVLNPSVAA |
| 1261 | TLGFGAYMSK AHGTDPNIRT GARTITTGAP ITYSTYGKFF ADGGCSGGAY |
| | DIIICDECHS |
| 1321 | TDSTTILGIG TVLDRAETAG ARLVVLATAT PPGSTTVPHP NIEEVALPNT |
| | GEIPFYGRAI |
| 1381 | PIEFIKGGRH LIFCPSKKKC DELAAKLSAL GINAVAYYRG LDVSVIPTSG |
| | DVVVVATDAL |
| 1441 | MTGYTGDFDS VIDCNTCVTQ TVDFSLDPTF TIETTTVPQD AVSRTQRRGR |
| | TGRGRGGIYR |
| 1501 | FVTPGERPSG MFDSSVLCEC YDAGCAWYEL TPAETTVRLR AYLNTPGLPV |
| | CQDHLEFWES |
| 1561 | VFTGLNHIDA HFLSQTKQAG DNFPYLVAYQ ATVCARAQAP PPSWDQMWKC |
| | LIWLKPVLHG |
| 1621 | PTPLLYRLGA VQNEITLTHP ITKLIMASMS ADLEVVTSTW VLVGGVLAAL |
| | AAYCLTTGSV |
| 1681 | VIVGRIILSG RPAVIPDREV LYREFDEMEE CASHLPYIEQ GVQLAEQFKQ |
| | KALGLLQTAT |
| 1741 | KQAEAAAPVV ESKWRALETF WAKHMWNFIS GIQYLAALST LPGNPAIASL |
| | MAFTASITSP |
| 1801 | LTTQNTLLFN ILGGWVAAQL APASAASAFV GAGSAGAAIG TIGLGKVLVD |
| | ILAGYGAGVA |
| 1861 | GALVAFKVMS GEMPSTEDLV NLLPAILSPG ALVVGVVCAA ILRRHVGPGE |
| | GAVQWMNRLI |
| 1921 | AFASRGNHDS PTHYVPESDA AARVTQILSS LTITQLLKRL HQWINEDCST |
| | PCSGSWLRDV |
| 1981 | WDWICTVLTD FKTWLQSKLL PRLPGVPFFS CQRGYKGVWR GDGIMQTTCP |
| | CGAQITGHVK |
| 2041 | NGSMRIVGPK TCSNTWHGTF PINAYTTGPC TPAPTPNYSR ALWRVAAEEY |
| | VEVTRVGDFH |
| 2101 | YVTGMTTDNV KCPCQVPAPE FFTEVDGVRL HRYAPACKTL LREEVTFQVG |
| | LNQYLVGSQL |
| 2161 | PCEPEPDVAV LTSMLTDPSH ITAETAKRRL ARGSPPSLAS SSASQLSAPS |
| | LKATCTTHHD |
| 2221 | SPDADLIEAN LLWRQEMGGN ITRVESESKV VILDSFDPLR AEEGEGEVSV |
| | AAEILRKSKK |
| 2281 | FPPALPEWAR PDYNPPLLES WKDPDYVPPV VHGCPLPPAK APPIPPPRRK |
| | RTVVLTESTV |
| 2341 | SSALAELAVK TFGSSESSAV DSGTATAPPD QVSDNGDKGS DAESYSSMPP |
| | LEGEPGDPDL |
| 2401 | SDGSWSTVSE EASEDVVCCS MSYSWTGALI TPCAAEESKL PINALSNSLL |
| | RHHNMVYATT |
| 2461 | SRSAGLRQKK VTFDRLQVLD DHYRDVLKEM KAKASTVKAK LLSVEEACKL |
| | TPPHSAKSKF |
| 2521 | GYGAKDVRNL SSRAVNHIRS VWKDLLEDTE TPIDTTIMAK SEVFCVQPEK |
| | GGRKPARLIV |
| 2581 | FPDLGVRVCE KMALYDVVST LPQAVMGPSY GFQYSPGQRV EFLVNAWKSK |
| | KCPMGFSYDT |
| 2641 | RCFDSTVTES DIRTEESIYQ CCDLAPEAKQ AIKSLTERLY IGGPLTNSKG |
| | QNCGYRRCRA |
| 2701 | SVVLTTSCGN TLTCYLKASA ACRAAKLQDC TMLVNGDDLV VICESAGTQE |
| | DAANLRAFTE |
| 2761 | AMTRYSAPPG DPPQPEYDLE LITSCSSNVS VAHDASGKRV YYLTRDPTTP |
| | LARAAWETAR |
| 2821 | HTPVNSWLGN IIMYAPTLWA RMILMTHFFS ILLAQEQLEK ALECQIYGAC |
| | YSIEPLDLPQ |
| 2881 | IIERLHGLSA FSLHSYSPGE INRVASCLRK LGVPPLRVWR HRARRVRAKL |
| | LSQGGRAATC |
| 2941 | GKYLFNWAVR TKLKLTPIPA ASRLDLSSWF VAGYSGGDIY HSVSHARPRW |
| | FMLCLLLLSV |
| 3001 | GVGIYLLPNR |

[0170] An example of an HCV subtype 1c strain HC-G9 can be found in the NCBI database as accession number D14853 (gi 464177). The polyprotein sequence (BAA03581.1) is as follows:

| (SEQ ID NO: 609) | |
|---|---|
| 1 | MSTNPKPQRK TKRNTNRRPQ DVKFPGGGQI VGGVYLLPRR GPRVGVRATR |
| | KTSERSQPRG |
| 61 | RRQPIPKARR PEGRSWAQPG YPWPLYGNEG CGWAGWLLSP RGSRPSWGPS |
| | DPRRRSRNLG |
| 121 | KVIDTLTCGF ADLMGYIPLV GAPLGGAARA LAHGVRVLED GVNYATGNLP |
| | GCSFSIFLLA |
| 181 | LLSCLTVPAS AVGVRNSSGV YHVTNDCPNA SVVYETENLI MHLPGCVPYV |
| | REGNASRCWV |
| 241 | SLSPTVAARD SRVPVSEVRR RVDSIVGAAA FCSAMYVGDL CGSIFLVGQI |
| | FTFSPRHHWT |
| 301 | TQDCNCSIYP GHVTGHRMAW DMMMNWSPTG ALVVAQLLRI PQAIVDMIAG |
| | AHWGVLAGLA |
| 361 | YYSMVGNWAK VVVVLLLFAG VDAETRVTGG AAGHTAFGFA SFLAPGAKQK |
| | IQLINTNGSW |
| 421 | HINRTALNCN ESLDTGWLAG LLYYHKFNSS GCPERMASCQ PLTAFDQGWG |
| | PITHEGNASD |
| 481 | DQRPYCWHYA LRPCGIVPAK KVCGPVYCFT PSPVVVGTTD RAGVPTYRWG |
| | ANETDVLLLN |
| 541 | NSRPPMGNWF GCTWMNSSGF TKTCGAPACN IGGSGNNTLL CPTDCFRKHP |
| | DATYSRCGSG |
| 601 | PWLTPRCLVD YPYRLWHYPC TVNYTIFKIR MFVGGVEHRL DAACNWTRGE |
| | RCDLDDRDRA |
| 661 | ELSPLLLSTT QWQVLPCSFT TLPALSTGLI HLHQNIVDVQ YLYGLSSAVT |
| | SWVIKWEYVV |
| 721 | LLFLLLADAR ICACLWMMLL ISQVEAALEN LIVLNAASLV GTHGIVPFFI |
| | FFCAAWYLKG |
| 781 | KWAPGLAYSV YGMWPLLLLL LALPQRAYAL DQELAASCGA TVFICLAVLT |
| | LSPYYKQYMA |
| 841 | RGIWWLQYML TRAEALLQVW VPPLNARGGR DGVVLLTCVL HPHLLFEITK |
| | IMLAILGPLW |
| 901 | ILQASLLKVP YFVRAHGLIR LCMLVRKTAG GQYVQMALLK LGAFAGTYIY |
| | NHLSPLQDWA |
| 961 | HSGLRDLAVA TEPVIFSRME IKTITWGADT AACGDIINGL PVSARRGREV |
| | LLGPADALTD |
| 1021 | KGWRLLAPIT AYAQQTRGLL GCIITSLTGR DKNQVEGEVQ IVSTATQTFL |
| | ATCVNGVCWT |
| 1081 | VYHGAGSRTI ASASGPVIQM YTNVDQDLVG WPAPQGARSL TPCTCGASDL |
| | YLVTRHADVI |
| 1141 | PVRRRGDNRG SLLSPRPISY LKGSSGGPLL CPMGHAVGIF RAAVCTRGVA |
| | KAVDFVPVES |
| 1201 | LETTMRSPVF TDNSSPPTVP QSYQVAHLHA PTGSGKSTKV PAAYAAQGYK |
| | VLVLNPSVAA |
| 1261 | TLGFGAYMSK AHGIDPNVRT GVRTITTGSP ITHSTYGKFL ADGGCSGGAY |
| | DIIICDECHS |
| 1321 | VDATSILGIG TVLDQAETAG VRLTILATAT PPGSVTVPHS NIEEVALSTE |
| | GEIPFYGKAI |
| 1381 | PLNYIKGGRH LIFCHSKKKC DELAAKLVGL GVNAVAFYRG LDVSVIPTTG |
| | DVVVVATDAL |
| 1441 | MTGYTGDFDS VIDCNTCVVQ TVDFSLDPTF SIETSTVPQD AVSRSQRRGR |
| | TGRGKHGIYR |
| 1501 | YVSPGERPSG MFDSVVLCEC YDAGCAWYEL TPAETTVRLR AYLNTPGLPV |
| | CQDHLEFWES |
| 1561 | VFTGLTHIDA HFLSQTKQSG ENFPYLVAYQ ATVCARAKAP PPSWDQMWKC |
| | LIRLKPTLTG |
| 1621 | ATPLLYRLGG VQNEITLTHP ITKYIMACMS ADLEVVTSTW VLVGGVLAAL |
| | AAYCLSTGSV |
| 1681 | VIVGRIILSG KPAVIPDREV LYREFDEMEE CAAHIPYLEQ GMHLAEQFKQ |
| | KALGLLQTAS |
| 1741 | KQAETITPAV HTNWQKLESF WAKHMWNFVS GIQYLAGLST LPGNPAIASL |
| | MSFTAAVTSP |
| 1801 | LTTQQTLLFN ILGGWVAAQL AAPAAATAFV GAGITGAVIG SVGLGKVLVD |
| | ILAGYGAGVA |
| 1861 | GALVAFKIMS GEAPTAEDLV NLLPAILSPG ALVVGVVCAA ILRRHVGPGE |
| | GAVQWMNRLI |
| 1921 | AFASRGNHVS PTHYVPESDA SVRVTHILTS LTVTQLLKRL HVWISSDCTA |
| | PCAGSWLKDV |
| 1981 | WDWICEVLSD FKSWLKAKLM PQLPGIPFVS CQRGYRGVWR GEGIMHARCP |
| | CGADITGHVK |
| 2041 | NGSMRIVGPK TCSNTWRGSF PINAHTTGPC TPSPAPNYTF ALWRVSAEEY |
| | VEVRRLGDFH |
| 2101 | YITGVTTDKI KCPCQVPSPE FFTEVDGVRL HRYAPPCKPL LRDEVTFSIG |
| | LNEYLVGSQL |
| 2161 | PCEPEPDVAV LTSMLTDPSH ITAETAARRL NRGSPPSLAS SSASQLSAPS |
| | LKATCTTHHD |
| 2221 | SPDADLITAN LLWRQEMGGN ITRVESENKI VILDSFDPLV AEEDDREISV |
| | PAEILLKSKK |
| 2281 | FPPAMPIWAR PDYNPPLVEP WKRPDYEPPL VHGCPLPPPK PTPVPPPRRK |
| | RTVVLDESTV |
| 2341 | SSALAELATK TFGSSTTSGV TSGEAAESSP APSCDGELDS EAESYSSMPP |
| | LEGEPGDPDL |
| 2401 | SDGSWSTVSS DGGTEDVVCC SMSYSWTGAL ITPCAAEETK LPINALSNSL |
| | LRHHNLVYST |
| 2461 | TSRSAGQRQK KVTFDRLQVL DDHYRDVLKE AKAKASTVKA KLLSVEEACS |
| | LTPPHSARSK |
| 2521 | FGYGAKDVRS HSSKAIRHIN SVWQDLLEDN TTPIDTTIMA KNEVFCVKPE |
| | KGGRKPARLI |
| 2581 | VYPDLGVRVC EKRALYDVVK QLPIAVMGTS YGFQYSPAQR VDFLLNAWKS |
| | KKNPMGFSYD |
| 2641 | TRCFDSTVTE ADIRTEEDLY QSCDLVPEAR AAIRSLTERL YIGGPLTNSK |
| | GQNCGYRRCR |
| 2701 | ASGVLTTSCG NTITCYLKAS AACRAAKLRD CTMLVCGDDL VVICESAGVQ |
| | EDAANLRAFT |
| 2761 | EAMTRYSAPP GDPPQPEYDL ELITSCSSNV SVAHDGAGKR VYYLTRDPET |
| | PLARAAWETA |
| 2821 | RHTPVNSWLG NIIMFAPTLW VRMVLMTHFF SILIAQEHLE KALDCEIYGA |
| | VHSVQPLDLP |
| 2881 | EIIQRLHGLS AFSLHSYSPG EINRVAACLR KLGVPPLRAW RHRAHCVRAT |
| | LLSQGGRAAI |
| 2941 | CGKYLFNWAV KTKLKLTPLP SASQLDLSNW FTGGYSGGDI YHSVSHVRPR |
| | WFFWCLLLLS |
| 3001 | VGVGIYLLPN R |

[0171] Other HCV polyprotein sequences are known in the art, see for example, the web sites http://www.hcvdb.org/viruses.asp; http://www.ncbi.nlm.nih.gov/ and http://hcv.lanl.gov/content/sequence/LOCATE/locate.html. Additional examples include a Taiwan isolate of hepatitis C virus available in the NCBI database at accession number P29846 (gi: 266821). Other examples of HCV polyprotein sequences include those at the NCBI accession number AF009606, AY734971, AJ238799, AY545953, AY734974, AB047639, AF177036, AY734977, AY734982, AY734984, AY734987, EF427672, and AY736194.

[0172] The HCV polyprotein that is generated by translation of the HCV ORF is processed to generate at least ten proteins termed C, E1, E2, p7, NS2, NS3, NS4A, NS4B, NS5A and NS5B (see e.g. Moradpour et al., (Nature Review (2007) 5:453-463). The C protein constitutes the nucleocapsid; E1 and E2 are transmembrane envelope glycoproteins; p7 is a membrane spanning protein of unknown function; and the various non-structural (NS) proteins have replication functions (Bartenschlager and Lohmann, 2000; Op De Beeck et al., 2001). The polyprotein precursor is co- and post-translationally processed by cellular and viral proteases into the mature structural and non-structural proteins. The structural proteins, including the core protein (corresponding to amino acid residues 1-191 of the H77 polyprotein set forth in SEQ ID NO:607), and the envelope glycoproteins E1 (corresponding to amino acid residues 192-383 of SEQ ID NO:607) and E2 (corresponding to amino acid residues 384-746 of SEQ ID NO:607) as well as p7 (corresponding to amino acid residues 747-809 of SEQ ID NO:607) are processed by the endoplasmic reticulum (ER) signal peptidases. The non-structural proteins, including NS2 (corresponding to amino acid residues 810-1026 of SEQ ID NO: 607), NS3 (corresponding to amino acid residues 1027-1657 of SEQ ID NO: 607), NS4A (corresponding to amino acid residues 1658-1711 of SEQ ID NO: 607), NS4B (corresponding to amino acid residues 1712-1972 of SEQ ID NO: 607); NS5A (corresponding to amino acid residues 1973-2420 of SEQ ID NO: 607) and NS5B (corresponding to amino acid residues 2421-3011 of SEQ ID NO: 607), are processed by two viral proteases, the NS2-3 protease and the NS3-4A serine protease.

[0173] E1 and E2

[0174] HCV entry into host cells requires attachment of the viral particle to the cell surface, followed by fusion of the viral envelope with the cellular membrane. The HCV envelope glycoproteins, E1 and E2, are thought to be involved in mediating virus entry into susceptible target cells. The E2 glycoprotein in particular is believed to be responsible for target cell binding. Thus, these polypeptides are targets for anti-viral agents, including anti-HCV antibodies.

[0175] As noted above, E1 and E2 are produced as part of the HCV polyprotein and then processed by cellular proteases before forming a non-covalent E1E2 complex, which is retained in the ER. Both E1 and E2 are heavily glycosylated. For example, the E1 polypeptide of H77 contains four N-linked glycans at positions corresponding to position 196, 209, 234 and 305 corresponding to the polyprotein set forth in SEQ ID NO: 607, while the E2 polypeptide contains 11 N-linked glycans at positions corresponding to position 417, 423, 430, 448, 476, 532, 540, 556, 576, 623 and 645 corresponding to the polyprotein set forth in SEQ ID NO: 607 (reference to an amino acid position of any protein of HCV, including E1 and E2, is made with reference to the position in the polyprotein, not to the mature protein).

[0176] Both E1 and E2 contain C-terminal transmembrane domains, which are involved in heterodimerization. The C-terminal region of E1, approximately corresponding to amino acids 331-383, is mainly responsible for membrane association and for inducing changes in membrane permeability. E1 also has a conserved internal hydrophobic region spanning amino acids 262-291 that could be involved in membrane permeabilizing activity (Ciccaglione et al., (2001) 82:2243-2250). The C-terminal region of E2 approximately corresponds to amino acids 715-746. Mutagenesis of the residues in the transmembrane domain indicate that these residues are critical for E1E2 heterodimerization and membrane retention, and viral entry. (Ciczora et al., (2005) J Gen Virol. 86:2793-2798)

[0177] Studies indicate that the E1E2 complex is involved in virus attachment to the host cell and internalization of the virus through clathrin-dependent endocytosis and fusion with host membrane. Further, the E1E2 complex binds to human LDLR, CD81 and SCARB1/SR-BI receptors, although these interactions have not been shown to be sufficient for infection (see e.g. Hsu et al., (2003) PNAS 100:7271-7276). While the precise mechanism of HCV binding and entry is not known, both E1 and E2 are targets of neutralizing antibodies. Development of polypeptides that are immunoreactive with the E1 or E2 polypeptide is believed to provide an especially effective regimen for preventing or treating HCV infection. For example, polypeptides that are immunoreactive with the E1 or E2 polypeptide can be used prophylactically in an HCV vaccine to protect against a new infection or prevent recurrent infection, for example, following liver transplantation. Polypeptides that are immunoreactive with the E1 or E2 polypeptide can be particularly useful in situations where the sera of a patient do not exhibit an immunoresponse to a viral challenge but the patient nevertheless carries the virus.

### C. ANTI-HCV POLYPEPTIDES AND ANTIBODIES

[0178] Provided herein are polypeptides that, either alone or in combination with other polypeptides, can bind to HCV. Included among the polypeptides provided herein are antibodies and fragments thereof that bind to HCV. In some instances, the antibodies and fragments thereof selectively bind E2, including E2 when expressed as a recombinant protein alone or in the E1E2 complex. In other instances, the antibodies and fragments thereof selectively bind the E1E2 complex but do not bind isolated E2 alone or a linear epitope of E1. Such antibodies can bind, for example, a conformational epitope in the E1E2 complex containing residues from E1, or a conformational epitope in the E1E2 complex, wherein the epitope is made up of residues from both the E1 and E2 polypeptides. Also provided are antibodies that bind to the same epitope as any of the antibodies described herein.

[0179] 1. Polypeptides

[0180] The polypeptides provided herein that, either alone or in combination with other polypeptides, bind to HCV have an amino acid sequence that incorporates at least one complementarity-determining region (CDR) amino acid sequence set forth in the Tables 10, 11, 18, 19, 30 or 31, including those set forth in SEQ ID NOS: 78-308, 725-834 and 1090-1133, or a CDR having at least 70%, 80%, 90%, 91%, 92%, 93%, 94%, 95%, 96%, 97%, 98%, 99% or more sequence identity with a sequence of amino acids set forth in any of SEQ ID NOS: 78-308, 725-834 and 1090-1133. Typically, the polypeptides have at least one CDR with a sequence set forth in any of SEQ ID NOS: 725-834 or 1090-1133. In some examples, the polypeptides have two or three CDR sequences (a CDR triplet). Each CDR can have any of the CDR sequences described herein. In instances where the polypeptide contains a CDR triplet, the CDR triplet typically includes one CDR1 sequence, one CDR2 sequence and one CDR3 sequence described herein. For example, the first CDR can have any one of the CDR1 sequences set forth in SEQ ID NOS: 78-108; 171-205; 725-741, 778-796, 1090, 1091 and 1101-1113; the second CDR has any one of the CDR2 sequences set forth in SEQ ID NOS: 109-139; 206-240; 742-759, 797-815, 1092-1096 and 1114-1121; and the third CDR has any one of the CDR3 sequences set forth in SEQ ID NOS: 140-170; 241-275; 760-777, 816-834, 1097-1100 and 1122-1133. These sequences also are set forth in Tables 10, 11, 18, 19, 30 and 31.

[0181] The CDRs in a triplet can all be light chain CDR sequences, heavy chain CDR sequences or any combination of three CDR sequences described herein. Exemplary light chain CDR sequences include those set forth in SEQ ID NOS: 171-275, 291-308, 778-834 and 1101-1133. Exemplary heavy chain CDR sequences include those set forth in SEQ ID NOS: 78-170, 276-290, 725-777 and 1090-1100.

[0182] The sequences of the three CDRs in a polypeptide can be selected from the CDR sequences of one antibody group, i.e. one of the 22 different antibody groups A, B, C, D, E, F, G, H, I, J, K, L, M, N, O, P, Q, R, S, T, U, and V set forth in Tables 3 and 4. The antibody groups are based on heavy chain sequence identity. In some examples, a polypeptide containing three CDRs contains three CDRs from a single chain Fab fragment set forth in Tables 3 and 4 (SEQ ID NOS: 1-66, 986-1023 and 1062-1089). For example, a polypeptide provided herein can contain the heavy chain CDR1, CDR2 and CDR3 from the Fab heavy chain of any one of the Fabs set forth in Table 3, below. In another example, the polypeptide contains the CDR1, CDR2 and CDR3 from a Fab light chain set forth in Table 4.

[0183] When a polypeptide has two or more CDRs, for example, a CDR triplet, the CDRs can be appropriately spaced and held in place by spacer sequences such that in three-dimensional space, the CDRs and spacer sequences form a globular immunoglobulin domain in which the CDRs come together to form an antigen-binding surface. Thus, included among the polypeptides provided herein are those that have spacer amino acid sequences between each CDR sequence. These spacer sequences can resemble those in a human or other mammalian antibody, i.e. can be of similar lengths as that between the CDR sequences of a human or other mammalian antibody. In some examples, the CDRs and spacer sequences are arranged so that the resulting polypeptide resembles the variable region of a single chain of an antibody.

[0184] Although any spacer peptide sequence, such as an amino acid sequence having little or no ionic or lipophilic side chains, can be used, typically, a spacer sequence is a mammalian antibody variable region framework sequence, which are well known in the art and can readily be identified by one of skill in the art. For example, human framework sequences are provided, for example, in IMGT®, the international ImMunoGeneTics information system (http://imgt.cines.fr/) and Kabat et al., Sequences of proteins of immunological interest edn 5th: National Institutes of Health Publication No. 91-3242 (1991), and the National Center for Biotechnology Information (NCBI) genebank. In some examples, the polypeptides provided herein that, alone or in combination with another polypeptide, bind HCV, contain any one or more of the CDR or framework sequences described herein, including any combination of CDR and framework sequences described herein. When a polypeptide has two or three CDRs, the CDRs can be linked by human framework sequences. In some examples, the human framework sequences are consensus framework sequences of a human immunoglobulin, such as an IgG. In other examples, the framework sequences linking the two or three CDRs are any of those set forth in Tables 10, 11, 18, 19, 30 or 31, including any with a sequence of amino acids set forth in any of SEQ ID NOS: 309-572; 573-587; 593-610 and 835-982, 1134-1205. Any framework sequence can be used to link two or more CDRs.

[0185] In some examples, when a polypeptide has two or more, e.g. three, CDRs, and flanking framework sequences, the first CDR and first framework sequences is any combination of CDR 1 and framework 1 sequences described herein. The second CDR and framework sequences can be any combination of CDR2 and framework 2 sequences described herein. Similarly, the third CDR and framework sequences can be any combination of CDR3 and framework3 sequences described herein. For example, the polypeptides provided herein include those that have a combination of CDR and framework sequences from within the same antibody group disclosed herein, i.e. from within any one of groups A-V, but from different antibodies. Alternatively, a polypeptide can have a combination of CDR and framework sequences such as present in one of the Fab fragment light or heavy chains shown below. As such, included in the polypeptides provided herein are light chains and heavy chains of an antigen-binding fragment (Fab) of an antibody. Table 3 sets forth the heavy and light chains of exemplary Fabs described herein. These Fabs, as described in further detail below and in the Examples, selectively bind E2 and/or the E1E2 complex.

TABLE 3
Sequences of Fab Heavy Chain

| | | |
|---|---|---|
| | SEQ | |
| Fab | ID NO | Heavy Chain Polypeptide Sequence |

| | | |
|---|---|---|
| A | 1 | LEQSGAEVKKPGSSVKVSCKASGGTFSSFVINWVRQAPGQGLEW |
| | | VGGIFQAPGPEREWLRDINPISGTINYAQRFQGRVTMTADESMT |
| | | TVYMELSSLRSEDTAMYYCARENKFRYCRGGSCYSGAFDMWGQG |
| | | TMVTVSSAS |
| B1 | 2 | LEQSGAEVKKPGSSVKVSCRASGSPFSSYTITWVRQAPGQGLEW |
| | | MGGIILMTGKANYAQKFQGRVTITADRSTTTAYMEMSSLTSDDT |
| | | AIYYCARDPYVYAGDDVWSLSRWGQGTLVIVSSAS |
| B2 | 3 | LEQSGAEVKKPGSSVKVSCRASGSPYSSYTITWVRQAPGQGLEW |
| | | MGGIILMTGKANYAQKFQGRVTITADRATATAYMEMSSLTSDDT |
| | | AIYYCARDPYVYAGDDVRSLSRWGQGTPVIVSSAS |
| B3 | 4 | LEQSGAEVKKPGSSVKVSCRASGSPYSSYTITWVRQAPGQGLEW |
| | | MGGIILMTGKANYAQKFQGRVTITADRATATAYMEMSSLTSDDT |
| | | AIYYCARDPYVYAGDDVWSLSRWGQGTPVIVSSAS |
| B4 | 1062 | EVQLLEQSGAEVKKPGSSVKVSCRASGSPFSSYTITWVRQAPGQ |
| | | GLEWMGGIILMTGKANYAQKFQGRVTITADRSTTTAYMEMSSPT |
| | | SDDTAIYYCARDPYVYAGDDVWSLSRWGQGTLVIVSP |
| B5 | 1063 | EVQLLESGAEVKKPGSSVKVSCRASGSPYSSYTITWVRQAPGQG |
| | | LEWMGGIILMTGKANYAQKFQGRVTITADRATATAYMEMSSLTS |
| | | DDTAIYYCARDPYVYAGDDVWSLSRWGQGTPVIVSSAS |
| B6a & | 1064 | EVQLLEQSGAEVKKPGSSVKVSCRASGSPYSSYTITWVRQAPGQ |
| B6b & | | GLEWMGGIILMTGKANYAQKFQGRVTITADRATATAYMEMSSLT |
| B6c | | SDDTAIYYCARDPYVYAGDDVWSLSRWGQGTPVTVSSAS |
| B7 | 1065 | EVQLLEQSGAEVKKPGSSVKVSCRASGSPYSSYTITWVRQAPGQ |
| | | GLEWMGGIILMTGKANYAQKFQGRVTITADRATATAYMEMSSLT |
| | | SDDTAIYYCARDPYVYAGDDVWSLSRWGQGTPVIVSSAS |
| C1 & C1* | 5 | LEQSGAEVKTPGSSVRVSCRPPGGNFNSYSINWVRQAPGHGLEW |
| | | VGTFIPMFGTSKYAQKFQGRVTITADGSSGTAYMDLNSLRSDDT |
| | | AFYYCVRPETPRYCSGGFCYGEFDNWGQGTLVTVSSAS |
| C2 & C2* | 6 | LEQSGAEVKKPGSSVRVSCRAPGGTFNSYSVNWVRQAPGHGLEW |
| | | VGTLIPMFGTSSYAQKFQGRVTITADGSSGTAYMELNSLRSDDT |
| | | AVYYCVRPETPRYCRGGFCYGEFDNWGQGTLVTVSSAS |
| C3 | 7 | LEQSGAEVKEPGSSVRVSCRAPGGTFNSYSINWVRQAPGHGLEW |
| | | VGTLIPMFGTSNYAQKFQGRVTITADGSSGTAYMELNSLRSDDT |
| | | AVYYCVRPETPRYCSGGVCYGEFDNWGQGTLVTVSSAS |
| C4 | 8 | LESGAEVKKPGSSVRVSCRPPGGTFNSYSINWVRQAPGHGLEWV |
| | | GTIIPMFGTSKYAQKLQGRVTITADGSSGTAYMELNSLRSDDTA |
| | | VYYCVRPETPRYCSGGFCYGEFDNWGQGTLVTVSSAS |
| C5 | 9 | LEQSGAEVKKPGSSVRVSCRAPGGTLNSYSINWVRQAPGHGLEW |
| | | VGTLIPMFGTSNYAQKFQGRVTITADGSSGTAYMELNSLRSDDT |
| | | AVYYCVRPETPRYCSGGFCYGEFDNWGQGTLVTVSSAS |
| C6 | 10 | LEQSGAEVKKPGSSVRVSCRPPGGTFNSYSINWVRQAPGHGLEW |
| | | VGTIIPMFGTSKYAQKLQGRVTITADGSSGTAYMELNSLRSDDT |
| | | AVYYCVRPETPRYCSGGFCYGEFDNWGQGTLVTVSSAS |
| D1 | 11 | LESGGGLVQPGGSLRLSCEASGYYFSSFAMSWVRQTPGKGLEWV |
| | | SSIAGGTLGRTSYRDSVKGRFTISRDNSKNTVFLHMNNLRPEDT |
| | | AVYYCAKDPLLFAGGPNWFDHWGQGTLVTVSSAS |
| D2 | 12 | LEQSGGGLVQPGGSLRLSCEASGYYFSSFAMSWVRQTPGKGLEW |
| | | VSSIAGGTLGRTSYRDSVKGRFTISRDNSKNTVFLHMNNLRPED |
| | | TAVYYCAKDPLLFAGGPNWFDHWGQGTLVTVSSAS |
| D3 | 13 | LESGGGLVQPGGSLRLSCEASGYYFSSFAMSWVRQTPGKGLEWV |
| | | SSIAGGTLGRTSYRDSVKGRFTISRDNSKNTMFLHMNNLRPEDT |
| | | AVYYCAKDPLLFAGGPNWFDHWGQGTLVTVSSAS |
| D4 | 14 | LESGGGLVQPGGSLRLSCEASGYYFSSFAMSWVRQTPGKGLEWV |
| | | SSIAGGTLGRTSYRDSVKGRFTISRDNSKNTVFLHMSNLRPEDT |
| | | AVYYCAKDPLLFAGGPNWFDHWGQGTLVTVSSAS |
| E | 15 | LEQSGAELKKPGSSVKVSCKPSDGTFRAYTLSWVRQAPGQTLEW |
| | | MGRIMPTVGITNYAQKFQGRVTISADMSTATAYMELSSLRSDDT |
| | | AIYYCAKGPYVGLGEGFSEWGQGTLVTVSSAS |
| E2 | 1066 | EVGLLEQSGAELKKPGSSVKVSCKPSDGTFRAYTLSWVRQAPGQ |
| | | TLEWLGRIMPTVGITNYAQKFQGRVTISADMSTATAYMQLSSLR |
| | | PDDTAIYYCAKGPYVGLGEGFSEWGQGTLVTVSS |
| E3 | 1067 | EVGLLEQSGAELKKPGSSVKVSCKPSDGTFRAYTLSWVRQAPGQ |
| | | ALEWMGRIMPTVGITNYARKFQGRVTISADMSTATAYMELSSLR |
| | | SDDTAIYYCAKGPYVGLGEGFSEWGQGTLVTVSS |
| E4 | 1068 | EVGLLEQSGAELKKPGSSVKVSCKPSDGTFRAYTLSWVRQAPGQ |
| | | TLEWMGRIMPTVGITNYAQKFQGRVTISADMSTATAYMELSSLR |
| | | SDDTAIYYCGKGPYVGLGEGFSEWGQGTLVTVSS |
| F | 16 | LEQSGNEVKKPGASVKVSCRAYGYNFGSERLSWVRQAPGQGLEW |
| | | MGWISAYNGGINYSQKFQGRFTMTTDTSTRTGYMELRNLRSDDT |
| | | AVYYCARGGGTEWGQGTLVIVSSDE |
| G | 17 | LEQSGAEMKKPGASLKVSCKTSGYTFDDYGVTWVRQAPGQGLEW |
| | | MGWISAYSGNTFYARKFQGRVTMTTDPSTRTAYMELRSLRSDDT |
| | | AVYFCARDRGLAINGVVFPYFGLDVWGQGTTVTVSSAS |
| H1, H1* | 18 | LEQSGAEVKKPGSSVKVSCEASGGTFDNYSLNWVRQAPGQGLEW |
| & H1** | | IGGVVPLFGTTKYAQKFQGRVTISDDKSTGTGHMELRSLRSEDT |
| | | AVYYCVHCVTPRHCGGGFCYGEFDYWGQGTLVTVSSAS |
| H2 | 19 | LEQSGAEVKKPGSSVKVSCETSGGTFDNYALNWVRQAPGQGLEW |
| | | IGGVVPLFGTTKYAQKFQGRVTISDDKSTGTGHMELRSLRSEDT |
| | | AVYYCVHCVTPRHCGGGFCYGEFDYWGQGTLVTVSSAS |
| H3 | 20 | LEQSGAEVKKPGSSVKVSCETSGGTLDNYALNWVRQAPGQGLEW |
| | | IGGVVPLFGTTRNAQKFQGRVTISDDKSTGTGHMELRSLRSEDT |
| | | AVYYCVHCVTPRYCGGGFCYGEFDYWGQGTLVTVSSAS |
| I | 21 | LESGGGLVQPGRSLRLSCKASGFNFAQYTMNWVRQAPGKGLEWI |
| | | GLIRTTAYDAATHYAASVEGRFTISRDDSKSTAYLQINGLKTED |
| | | TAVYYCARPHGPGLSLGIYSAEYFDEWGQGTLVTVSSAS |
| J1 | 22 | LEQSGPEVKKPGSSVKVSCKGSGDRFNDPVTWVRQAPGQGLEWI |
| | | GGIIPAFGATKYAQKFQGRVVISADASTDTAYMELSSLRSEDTA |
| | | VYYCAKVGVRGIILVGGLAMNWLDPWGQGTLVTVSAAS |
| J2 | 23 | LEQSGPEVKKPGSSVKVSCKDSGDTFNEPVTWVRQAPGQGLEWI |
| | | GGIIPAFGVTKYAQKFQGRVIISADASTATAYLELSSLRSEDTA |
| | | VYYCAKVGLRGIVMVGGLAMNWLDPWGQGTQVTVSSAS |
| J3 & | 24 | LEQSGPEVKKPGSSVKVSCKGSGDTFNDPVTWVRQAPGQGLEWI |
| J3* | | GGIIPLFGAAKYAQKFQGRVTISADASALTTYMEMSSLRPEDTA |
| | | VYYCAKVGLRGITLVGGLAMNWLDPWGQGTLITVSSAS |
| J4 | 25 | LEQSGAEVKKPGSSVRVSCEVSGDTFREPVSWVRQAPGQGFEWI |
| | | GGIIPMFGATHYAQKLQGRITISADQSTNTVYMELRSLRSDDTA |
| | | VYYCAKVGLRGINMVGGLAMNWFDPWGQGTLVTVSSAS |
| J5 | 1069 | EVQLLEQSGAEVKKPGSSVTVSCKASGGTVSSYPITWVRQAPGQ |
| | | GLEWMGGTIPVFGAPKYAPKFQGRVTITADESTSTAYMELRSLR |
| | | SDDTAMYYCAIVGMRGITLVGGLAMNWLDPWGQGTLVIVSS |
| K | 26 | LEQSGPGLVKPGRPFSLTCAISGDSVSSDSAAWNWVRQSPSRGL |
| | | EWLGRTFYRSKWYYDYTVSVKSRITINSDTSKNQFSLHLNSVTP |
| | | EDTAVYYCVRDFYIGPTRDVYYGMDVWGQGTTVTVSSAS |
| L1 | 27 | LEQSGAEVKKPGSSVKVSCKASGDTFRSYVITWARQAPGQGLEW |
| | | MGAIIPFFGTTNLAQKFQGRVTITADESTQTVYMDLSSLRSDDT |
| | | AVYYCAKAGDLSVGGVLAGGVPHLRHFDP WGQGTLVTVSSAS |
| L2 | 28 | LEQSGAEVKMPGSSVKVSCKASGDTFRSSVITWARQAPGQGLEW |
| | | MGAIIPFFGTTNLAQKFQGRVTITADESTKTVYMDLSSLRSDDT |
| | | AVYYCAKAGDLSVGGVLAGGVPHLRHFDPWGQGTLVTVSSAS |
| L3 | 29 | LEQSGAEVKKPGSSVKVSCKASGDTFRSYVITWARQAPGQGLEW |
| | | MGAIIPFFGTTNLAQKFQGRVTITADESTKTVYMDLSSLTSDDT |
| | | AVYYCAKAGDLSVGGVLAGGVPHLRHFDPWGQGTLVTVSSAS |
| L4 | 30 | LEQSGAEVKKPGSSVKVSCKASGDTFRSYVITWARQAPGQGLEW |
| | | MGAIIPFFGTTNLAQKFQGRVTITADESTKTVYMDLSSLRSDDT |
| | | AVYYCAKAGDLSVGGVLAGGVPHLRHFDPWGQGTLVTVSSAS |
| L5 | 1070 | EVQLLEQSGTEVKKPGSSVKVSCKVPGDTFRSYVITWVRQAPGQ |
| | | GLEWLGGILPFFGTTNLAQKFQGRVTLTADESTTTAYMELSSLR |
| | | AEDTAVYYCAKAGDLAFGGVIAGGVPHLSHFDPWGQGTLVTVSS |
| L6 | 1071 | EVQLLEQSGTEVKKPGSSVKVSCKVPGDTFRSYVITWVRQSPGQ |
| | | GLEWLGGILPFFGTTNLAQKFQGRVTLTADESTTTAYMELSSLR |
| | | SEDTAVYYCAKAGDLAFGGVIAGGVPHLSHFDPWGQGTLVTVSA |
| L7 | 1072 | EVQLLEQSGAEVKKPGSSVKVTCKVPGDTFRSYVITWVRQAPGQ |
| | | GLEWLGGILPFFGTTNLAQKFQGRVTLTADESTTTAYMELSSLR |
| | | AEDTAVYYCAKAGDLAFGGVIAGGVPHLSHFDPWGQGTLVTVSS |
| M | 31 | LEQSGAEVKKPGASVKVSCKASGYTFTNYAITWVRQAPGQGLEW |
| | | MGWISGDSTNTYYGQKFQGRVTMTTDTSTSTAYMELTSLTSEDT |
| | | AVYYCARESLYMIAFGRVIWPPLDYWGQGTLVTISSAS |
| N1 | 986 | EVQLLEQSGPEVKKPGDSLRISCKMSGDSLVTTWIGWVRQKPGQ |
| | | GLEWMGIINPGDSSTNIYPGDSATRYGPSFQGQVTISIDKSTST |
| | | AYLQWNAVKPSDTGIYYCARHVPVPISGTFLWREREMHDFGYFD |
| | | DWGQGTLVIVSS |
| N2 | 987 | EVQLLEQSGPEVKKPGDSLRISCKMSGDSLVTTWIGWVRQKPGQ |
| | | GLEWMGIINPGDSSTNIYPGDSATRYGPSFQGQVTISIDKSTST |
| | | AYLQWNTVKPSDTGIYYCARHVPVPISGTFLWREREMHDFGYFD |
| | | DWGQGTLVIVSS |
| N3 | 988 | EVQLLEQSGAEVKKPGDSLRISCKMSGDSLVWIGWVRQKPGQGL |
| | | EWMGIINPGDSATNIYPGDSDTRYGPSFQGQVTISIDKSTSTAY |
| | | LQWNAVKASDTGIYYCARHVPVPISGTFLWREREMHDLGYFDDW |
| | | GQGTLVIVSS |
| N4 | 989 | EVQLLEQSGPEVKKPGDSLRISCKMSGDSLVTTWIGWVRQKPGQ |
| | | GLEWMGIINPGDSSTNIYPGDSATRYGPSFQGQVTISIDKSTST |
| | | AYLQWNNVKASDTGIYYCARHVPVPISGTFLWREREMHDFGYFD |
| | | DWGQGTLVIVSS |
| O1 | 990 | EVQLLEQSGAEVKKAGESVRLSCKASGYRFGDYWIAWVRQLPGR |
| | | APEWMGIIYPDDSDTKYSPSFQGQVTISADKSIRTTFLDWGSLK |
| | | ASDTAIYYCARGCLGAKCYYPHYYYGLDVWGQGTTVIVSS |
| P1 | 991 | EVQLLESGGGVVQPGGSLRLSCAASGFTFTSFTMHWVRQAPGKG |
| | | LEWVALISHDGSNKDYADSVRGRFTVSRDNSKKMVYLQMSSLRP |
| | | DDAAVYYCARGGPAYYTYSDTLTGYHNVVGDYWGQGTLVTVSS |
| P1a | 992 | EVQLLESGGGVVQPGGSLRLSCAASGFTFTSFTMHWVRQAPGKG |
| | | LEWVALISHDGSNKDYADSVRGRFTVSRDNSKKMVYLQMSSLRP |
| | | DDAAVYYCARGGPAYYTYSDTLTGYHNVVGDYWGQGTLVTVSS |
| P2 | 993 | EVQLLESGGGVVQPGKSLRLSCAVSGFTLNTFAMHWVRQVPGKG |
| | | LEWVALTSHDGSRQDYADSVRGRFTISRDNSKSMVFLLMNSLRA |
| | | EDTAVYYCVRGGPAYYTYNDVLTGYAYVVGDFWGQGTLVTVSS |
| P3 | 994 | EVQLLESGGGVVQPGKSLTVSCAASGFTFSTFTMHWVRQAPGKW |
| | | LEWVAVISHDGGTEHYADSVTGRFTISRDNSKNTLHLQMNSLRP |
| | | EDTAVYFCARGGPAYYLYNDVLTGYYNVVGDFWGQGTLVTVSS |
| P4 | 995 | EVQLLESGGGVVQPGKSLTVSCAASGFTFSTFTMHWVRQAPGKG |
| | | LEWVAVISHDGGTEHYADSVTGRFTISRDNSKNTLHLQMNSLRP |
| | | EDTAVYFCARGGPAYYLYNDVLTGYYNVVGDFWGQGTLVTVSS |
| P5 | 996 | EVQLLESGGGVVQPGKSLTVSCAASGFTFSTFTMHWVRQAPGKW |
| | | LEWVAVISHDGGTEHYADSVTGRFTISRDNSKNTLHMQMNSLRL |
| | | EDTAVYFCARGGPAYYLYNDVLTGYYNVVGDFWGQGTLVTVSS |
| P6 | 997 | EVQLLEQSGAEVRKPGASVKVSCKASGYTFTNNGLNWVRQAPGQ |
| | | GLEWMGWISPYNGDTDFAHKFQGRISMTTDTSTNTAYMELRSLR |
| | | SDDTAVYYCARDRNSAGGTWLFRDPPPGSTFFDSWGQGSLVTVS |
| | | S |
| Q1 | 998 | EVQLLEQSGAEVKKPGASVKVSCKASGYTFTNNGLNWVRQAPGQ |
| | | GLEWMGWISPYNGDTDFAHKFQGRISMTTDTSTNTAYMELRSLR |
| | | SDDTAVYYCARDRNSAGGTWLFRDPPPGSTFFDSWGQGSLVTVS |
| | | S |
| Q2 | 999 | EVQLLEQSGAEVKKPGASVKVSCKASGYTFSIYGVAWVRQAPGQ |
| | | GLEWMGWISPQNGDTHSPQKFQGRLTMTTDTSTSTAYMELRSLR |
| | | SDDTAVYFCARDYGVNFGGGSEHNLDYWGRGTRVTVSS |
| R1 | 1000 | EVQLLEQSGAEVKKPGTSVKVSCTASGYIFTSFGISWVRQAPGQ |
| | | GLEWMGRIDTYNGKTNYAQKLQGRVTMTTDTYTSTAYMELRSLT |
| | | SDDTAVYYCARDDCRSSTCYLAQHNWQAYYHDSWGQGTLVTVSS |
| S1 | 1001 | EVQLLESGGGLVQPGGSLRLSCAASGFTFSRFWMHWVRQAPGKG |
| | | LVWVARINSDGSSTTYADSVKGRFTISRDNAKNTLYLQMNSLRD |
| | | EDTAVYFCARGGDSSSPYYYPMDVWGQGTTVAVSS |
| S2 | 1073 | EVQLLEQSGAEVKKPGASVKVSCTASGYIFTSFGISWVRQAPGQ |
| | | GLEWMGRIDTYNGKTNYAQKLQGRVTMTTDTYTSTAYMELRSLT |
| | | SDDTAVYYCARDDCRSSTCYLAQHNWQAYYHDSWGQGTLVTVSS |
| T1 | 1002 | EVQLLEQSGPEVKRPGTSVKMSCKISGGASITQAMSWVRQAPGQ |
| | | GLEWMGGITPIFGTVNYAQKILGRVTITADEDTVSLELSSLKSE |
| | | DTAVYYCAREVNLKTWNLAHPNVFDVWGQGTMLTVSS |
| U1 | 1003 | EVQLLEQSGAEVQKPGASVKVSCKPSGYIFTNFGISWVRQAPGQ |
| | | GLEWMAWINTYNGKTTYAQSLQGRVTLTTDPYTNTVFMELRSLR |
| | | SDDTAVYYCARENEGEYVWGHFRSDYWGQGTLVTVSS |
| U2 | 1074 | EVQLLEQSGAEVKRPGSSVKLSCKNSGGTFITQAMSWVRQAPGQ |
| | | GLEWMGGIIPVFGTVNYAQNILDRATATADEDTFSLELRGLRLE |
| | | DTAVYYCAREVNLKTWNLARPDVFDIWGPGTLVTVSS |
| U3 | 1075 | EVQLLEQSGAEVKRPGSSVKISCKNSGGTFITQAMSWVRQAPGQ |
| | | GLEWMGGIIPIFGTVNYAQKILGRVTITADEDTVSMELSSLGFE |
| | | DTAVYYCAREVNLKSWNLAHPDVFDIWGQGTLVTVSS |
| V1 | 1004 | EVQLLEQSGPEVKKPGDSLRISCKMSGDSLVTTWIGWVRQKPGQ |
| | | GLEWMGIINPGDSSTNIYPGDSATRYGPSFQGQVTISIDKSTST |
| | | AYLQWNAVKPSDTGIYYCARHVPVPISGTFLWREREMHDFGYFD |
| | | DWGQGTLVIVSS |

TABLE 4
Sequences of Fab Light Chain

| | | |
|---|---|---|
| | (SEQ ID | |
| Fab | NO) | Light Chain Polypeptide Sequences |

| | | |
|---|---|---|
| A | 32 | ELTQSPATLSVSPGESATLSCRASQSVSDNLAWYQQKPGQAPRLLI |
| | | YGASSRAPAIPGRFSGSGSGTDFTLTISRLEPEDLAVYHCQQYGAS |
| | | PWTFGQGTKVEIKRTVAAPSVFIFPPSDEQLKSGTASVV |
| B1 | 33 | ELTLTQSPGTLSLSPGERATLSCRASQSVSNSYLAWYQQKPGQAPR |
| | | LLIYGASSRATGIPDRFSGSGSGTDFTLTISRLEPEDFAVYYCQQY |
| | | GSSPQTFGQGTKVEIKRTVAAPSVFIFPPSDEQLKSGTASVV |
| B2 | 34 | ELTQSPDSLAVSLGERATINCKSSQSVLYSSNNKNYLAWYQQKPGQ |
| | | PPQLLIYWASTRESGVPDRFSGSGSGTDFTLTISSLQAEDVAVYFC |
| | | QQYYSTPFTFGPGTKVEIKRTVAAPSVFIFPPSDEQLKSGTASVV |
| B3 | 35 | ELVMTQSPGTLSLSPGERATLSCRASQRVGSSYLAWYQQKPGQAPR |
| | | LLVYGASSRATGIPDRFSGSGSGTDFTLTISRLQPEDFAVYYCQQY |
| | | GTTFGQGTRVDIKRTVAAPSVSIFPPSDEQLKSGTASVV |
| B4 | 1076 | ELTLTQSPGTLSLSPGKRATLSCRASQSVSGSYLAWYQQKPGQAPR |
| | | LLIYGASNRATGIPHRFSGSGSGTDFTLTISRLEPEDFAVYYCQQY |
| | | GSSPPTFGQGTRVDIKRT |
| B5 | 1077 | ELTQSPLSLPVIIGQPASISCSSSESLVDSDGNTYLHWFQQRPGQS |
| | | PRRLIYKVSNRDAGVPDRFSGSGSGTDFTLKISRVEAEDVAVYYCM |
| | | QATHWPPITFGPGTRLEVKRT |
| B6a | 1078 | LTQSPGTLSLSPGERATLSCRASQSVASNYVAWYQQKPGQAPRLLI |
| | | YGTSYRATGIPGRFSGSGSGTDFTLTISGLEPEDFAVYYCQQYGSS |
| | | PQTFGQGTKVEIKRT |
| B6b | 1082 | ELTQSPGTLSLSPGERATLSCRASQSVSRGNLAWYQQKRGQPPRLL |
| | | IYGASYRATGIPDRFSGSGSGTDFTLTITKLEPEDFAVYYCQQYGH |
| | | SLAFGQGTKVEIKGT |
| B6c | 1365 | ELTQSPGTLSLSPGERATLSCRASQSVSSSYLAWYQQKPGQAPRLL |
| | | IYGASSRATGIPDRFSGSGSGTDFTLTISRLEPEDFAVYYCQQYGS |
| | | SPQTFGQGTKVEIKRT |
| B7 | 1079 | ELTQSPLSLPVTLGQPASISCRSSQSLVYSDGNTYLNWFQQRPGQS |
| | | PRRLIYKVSNRDSGVPDRFSGSGSGTDFTLKISRVEAEDVGVYYCM |
| | | QGTHWPPTFGQGTKVDIKRT |
| C1 | 36 | ELTLTQSPGTLSLSPGERATLSCRASQSVSGNYLAWYQQKPGQAPR |
| | | LLIYGASNRATGIPHRFSGSGSGTDFTLTISRLEPEDFAVYYCQQY |
| | | GSSPTFGQGTRVDIKRTVAAPSVFIFPPSDEQLKSGTASV |
| C1* | 37 | ELTQSPSTLSLSPGEGATLSCRPSQSVSRNYLAWYQQKPGQAPRLL |
| | | IYGASTRATGIPDRFSGSGSGTNFTLTISRLEPEDFAVYFCQHYGN |
| | | SPPYTFGQGTKLEIKRTVAAPSVFIFPP |
| C2 | 38 | ELTQSPGTLSLSPGERAALSCRASQSISTNYLAWYQQKPGQAPRLL |
| | | IYGTSNRATGIPDRFSGTGSGTDFSLTISRLEPEDSAVYYCQQYGT |
| | | SPFTFGPGTKVDIKRTVAAPSVFIFPPS |
| C2* | 39 | ELTQSPGTLSLSPGERATLSCRASQSVSSSYLAWYQQKPGQAPRLL |
| | | IYGASSRATGIPDRFSGSGSGTDFTLTISRLEPEDFAVYYCQQYGS |
| | | SPQTFGQGTKVEIKRTVAAPSVFIFPPSDEQLKSGTASVV |
| C3 | 40 | ELTQSPGTLSLSPGERATLSCRASQSVSSSYLAWYQQKPGQAPRLL |
| | | IYGASSRATGIPDRFSGSGSGTDFTLTISGLEPEDFAVYYCQQYGS |
| | | SPLTFGGGTKVEIKRTVAAPSVFIFPPSD |
| C4 | 41 | ELTQSPGTLSLSPGERATLSCRASQSVSSSYLAWYQQKPGQAPRLL |
| | | IYGASSRATGIPDRFSGSGSGTDFTLTISRLEPEDFAVYYCQHYGS |
| | | SSYTFGQGTRVEIKRTVAAPSVFIFPPSDEQLKSGTASVV |
| C5 | 42 | ELTQSPATLYVSPGERATLSCRASQSVPDNHLAWYQQKPGQTPRLL |
| | | IYGASKRATGIPDRFSGSGSGTDFTLTISRLEPEDFAVYYCQQYGS |
| | | SPQTFGQGTKVEIKRTVAAPSVFIFPPSDEQLKSGTASVV |
| C6 | 43 | ELTQSPGTLSVSPGEAATLSCRASQSVSSNLAWYQQKPGQAPRLLI |
| | | YGASTRATGIPARFSGSGSGTDFTLTISRLEPEDFAVYYCQQYGGS |
| | | PPYTFGQGTKLEIKRTVAAPSVFIFPPSDEQLKSGTASVV |
| D1 | 44 | ELTQSPGTLSLSPGERATLSCRASQSVSSSYLAWYQQKPGQAPRLL |
| | | IYGASSRATGIPDRFSGSGSGTDFTLTISRLEPEDFAVYYCQQYGS |
| | | SPQTFGQGTKVEIKRTVAAPSVFIFPPSDEQLKSGTASV |
| D2 | 45 | ELTQSPATLSVSPGERATLSCRASQTISDNLAWYQQKPGQAPRLLI |
| | | YGASSRATGIPDRFSGSGSGTDFTLTISRLEPEDFAVYYCQQYGSS |
| | | PQTFGQGTKVEIKRTVAAPSVFIFPPSD |
| D3 | 46 | ELTLTQSPGTLSLSPGERATLSCRASQTVSSSYLAWYQQKPGQAPR |
| | | LLIYGASSRATGIPDRFSGSGSGTDFTLTISRLEPEDFAVYYCQQY |
| | | GSSPQTFGQGTKVEIKRTVAAPSVFIFPPSDEQLKSGTA |
| D4 | 47 | ELVMTQSPGTLSLSPGERATLSCRASQSVSSSYLAWYQQKPGQAPR |
| | | LLIYGASSRATGIPDRFSGSGSGTDFTLTITRLEPEDFAVYYCQQY |
| | | GSSPQTFGQGTKVQIKRTVAAPSVFIFPPSDEQLKSGTA |
| E | 48 | ELVLTQSPLSLPVTLGQPASISCRSTQSLVYSDGNTYLNWFHQRAG |
| | | QPPRRLIYKVSNRDSGVPERFSGSGSGTDFTLKISRVEAEDVGIYY |
| | | CMQGAHWPPTFGGGTKVEINRTVAAPSVFIFPPSDEQLKSGTAS |
| E2 | 1080 | ELTQSPLSLPVTLGQPASISCRSSQSLVYSDGNTYLIWFQQRPGQS |
| | | PRRLIYNVSNRDSGVPDRFSGSGSGTDFTLKISRVEAEDLGVYYCM |
| | | QGAHWPPTFGQGTRLEIKGT |
| E3 | 1081 | ELVLTQSPLSLPVTLGQPASISCRSTQSLVYSDGNTYLNWFHQRPG |
| | | QPPRRLIYKVSNRDSGVPERFSGSGSGTDFALKISRVEADDVGIYY |
| | | CMQGAHWPPTFGGGTKVEISRT |
| F | 49 | ELQMTQSPSFLSASVGDRVTITCRASQGISSYLAWYQQKPGKAPKL |
| | | LISSVSTLQSGVSSRFSGSGSGTGFTLTISSLQSEDSATYYCEQLN |
| | | SFPYTFGQGTKLEIKRTVAAPSVFIFPPSD |
| G | 50 | ELTQSPVSLPVTPGEPASISCRSSQSLLHSNGNHYLDWYLQKPGQS |
| | | PQLLMYLGSNRASGVPDRFSGSGSGTDFTLKISRVEAEDVGVYYCM |
| | | QGLQTPWTFGQGTKVEIKRTVAAPSVFIFPPSD |
| H1 | 51 | ELTLTQSPGTLSLSPGERATLSCRASQSISSSYLAWYQQKPGQAPR |
| | | LLIYGASRRATGIPDRFSGSGSGTDFTLTISRLEPEDFAVYYCQQY |
| | | GSSPLTFGGGTKVEIKRTVAAPSVFIFPPSD |
| H1* | 52 | ELTQSPATLSVSPGERATLSCRASRGISSNLAWYQQKPGQAPRLLI |
| | | YGASSRATGIPDRFSGSGSGTDFTLTISRLEPEDFAVYYCQQYGSS |
| | | PQTFGQGTEVEIKRTVAAPSVFIFPPSDEQ |
| H1** | 53 | ELTLTQSPGTLSLSPGERATLSCRASQSVSSDSLAWYQQKPGQAPR |
| | | LLIYGASSRATGIPDRFSGSGSGTDFTLTISRLEPEDLGVYYCQQY |
| | | GPSPPGYTFGQGTKLEIKRTVAAPSVFIFPPSDEQLKSGTASVV |
| H2 | 54 | ELTLTQSPGTLSLSPGERGTLSCRASQSVSSSYLAWYQQKPGQAPR |
| | | LLIYGASSRATGIPDRFSGSGSGTDFTLTISRLEPEDFAVYYCQQY |
| | | GSSPQTFGQGTKVEIKRTVAAPSVFIFPPSDEQLKSGTASVV |
| H3 | 55 | ELTQSPATLSVSPGERATLSCRASQSVSSNLAWYQQKPGQAPRLLI |
| | | YGASTRATGIPARFSGSGSGTEFTLTVSRLEPEDSAVYFCQQYYRS |
| | | PLTFGGGTKVEIKRTVAAPSVFIFPPSDEQLKSGTASVV |
| I | 56 | ELTLTQSPATLSVSPGERATLFCRANQSVGRNLAWYQQKPGQAPRL |
| | | LIYGISTRTTTTPTRFSGSGSGTDFTLTISRLQSEDFAVYYCQQYN |
| | | KWPPWTFGQGTKLEIKRTVAAPSVFVFPPS |
| J1 | 57 | ELTQSPGTLSLSPGERATLSCRASQSVSSSYLAWYQQKPGQAPRLL |
| | | IYGASSRATGIPDRFSGSGSGTDFTLTISRLEPEDFAVYYCQQYGS |
| | | SPQTFGQGTKVEIKRTVAAPSVFIFPPSDEQLKSGTASVV |
| J2 | 58 | ELTQSPGTLSLSPGERATLSCRASQSVSSSYLAWYQQKPGQAPRLL |
| | | IYGASSRATGIPDRFSGSGSGTDFTLTISGLEPEDFAVYYCQQYGS |
| | | SPQTFGQGTKVEIKRTVAAPSVFIFPPSDEQLKSGTASV |
| J3 | 59 | EFTLTQSPGTLSLSPGERGTLSCRASQSVSSSYLAWYQQKPGQAPR |
| | | LLIYGASSRATGIPDRFSGSGSGTDFTLTISRLEPEDFAVYYCQQY |
| | | GSSPQTFGQGTKVEIKRTVAAPSVFIFPPSDEQLKSGTASVV |
| J3* | 60 | ELTLTQSPGTLSLSPGERATLSCRASQSVSSSHLAWYQQKPGQAPR |
| | | LLIYGASSRATGIPDRFSGSGSGTDFTLTISRLEPEDFAVYYCQQY |
| | | GSSPQTFGQGTEVEIKRTVAAPSVFIFPPSDEQLKSGTASVV |
| J4 | 61 | ELTQSPGTLSLSPGERATLSCRASQSVSSNSLAWYQQKPGLAPRLL |
| | | IYGASSRATGIPERFSGSGAGTGFTLTISTLEPEDFAIYYCQQYGG |
| | | SPPRFTFGPGTKVDIRRTVAAPSVFIFPPSDEQLKSGTASVV |
| J5 | 1083 | ELTQSPGTLSLSPGERATLSCRASQSVSSNYLAWYQQKPGQAPRLL |
| | | IYGASSRATGIPDRFSGSGSGTDFTLSISRLEPEDFAVYYCQQYGS |
| | | SPLTFGGGTKVEIKRT |
| K | 62 | ELTQSPGTLSLSPGERATLSCRASQSVSSSYLAWYQQKPGQAPRLL |
| | | IYGASSRATGIPDRFSGSGSGTDFTLTISRLEPEDFAVYYCQQYGS |
| | | SPQTFGQGTKVEIKRTVAAPSVFIFPPSDEQLKSGTASVV |
| L1 & | 63 | ELTQSPGTLSLSPGERATLSCRASQSITSRYLAWYQQKPGQAPRLL |
| L2 | | IYGASSRATGIPDRFSGSGSGTDFTLTISRLEPEDFAVYYCQQYGD |
| | | SPVGFGPGTKVEIKRTVAAPSVFIFPPSDEQLKSGTASVV |
| L3 | 64 | ELVMTQSPATLSLSPGERATLSCRASQSVGSYLAWYQQKPGQAPRL |
| | | LIYDASNRATGIPARFSGSGSGTDFTLTISSLEPEDFAVYFCQQYG |
| | | SSPLTFGQGTKVEIKRTVAAPSVFIFPPSDEQLKSGTASVV |
| L4 | 65 | ELTQSPGTLSLSPGERATLSCRAGQTVASNSLAWYQHKPGQAPRLL |
| | | IYGASIRASGIPDRFSGSGSGTDFTLTISRLEPEDFAVYYCQQYGL |
| | | SPSTFGQGTRLEIKRTVAAPSVFIFPPSDEQLKSGTASVV |
| L5 | 1084 | ELTQSPGTLSLSPGERATLSCRASQSVRSNYLAWYQQKPGQAPRLL |
| | | IYGASSRATGIPDRFSGSGSGTDFTLTISRLEPEDFAMYYCQQYGS |
| | | SMCSFGQGTKVEIKRT |
| L6 | 1085 | ELTQSPGTLSLSPGERATLSCRASQSVSSSYLAWYQQKPGQAPRLL |
| | | IYGASSRATGIPDRFSGSGSGTDFTLTISRLEPEDFAVYYCQQYGS |
| | | SVTFGPGTKVDIKRT |
| L7 | 1086 | ELTQSPGTLSLSPGERATLSCRASQSVPSSYLGWYQQKPGQAPRLL |
| | | IYGASSRATGIPERFSGSGSGTDFTLTISRLEPEDFAVYYCQQYGS |
| | | SLSFGQGTKVDLKRT |
| M | 66 | ELTLTQSPGTLSLSPGERATLSCRASQSIRSSYLAWYQQKPGQAPR |
| | | LLIYAAASRATGIPDRFSGSGSGTDFTLTISRLEPEDFAVYFCHHY |
| | | GGSPRTFGQGTKVEIKRTVAAPSVFIFPPSDEQLKSGT |
| N1 | 1005 | ELTQSPGTLSLSPGERATLSCRASQSVSSSYLAWYQQKPGQAPRLL |
| | | IYGASNRAAGIPDRFSGSGSGADFTLTISRLEPEDFAVYYCQQYGS |
| | | SLITFGQGTRLEIKRT |
| N2 | 1006 | ELTQSPGTLSLFPGERATLSCRASQSILGRYLAWYQQKGGRAPRLL |
| | | IFGASKRATGIPDRFSGSGSGTDFTLTIGRLEPEDFAVYYCQHYGS |
| | | SITFGQGTRLDIKRT |
| N3 | 1007 | ELTQSPGTLSLSPGERATLSCRASQSVSSSYLAWYQQKPGQAPRLL |
| | | IYGASSRATGIPDRFSGSGSGTDFTLTISRLEPEDFAVYYCQQYGS |
| | | SLTFGGGTKVEIKRT |
| N4 | 1008 | ELTLTQSPGTLSLSPGERATLSCRASQSVSNNYLAWYQQKPGQAPR |
| | | LLIYGASSRATGIPDRFSGSGSGTGFTLIISRLEPEDFAVYYCQQY |
| | | GSSSITFGQGTRLEIKRT |
| O1 | 1009 | ELTQSPSSLSASVGDRVTITCRATQGIDNYLNWYQQKPGKPPRLLI |
| | | YGASSLQSGVPSRFSGGGSGTHFTLTITNLQPEDFATYYCQQSYST |
| | | PPETFGQGTKVEIKRT |
| P1 | 1010 | ELTQSPGTLSLSPGERATLSCRASQVRGFLAWFQQKPGQAPRLLIY |
| | | GASNRAPGIPDRFSGSGSGTDFTLTISRLEPEDFAVYYCQQYGDSP |
| | | PITFGQGTRLEIKRT |
| P1a | 1011 | ELTQSPGTLSLSPGERATLSCRTSQSVSSTYLAWYQQKPGQPPRLL |
| | | IYGASNRAPGIPDRFSGSGSGTDFTLTISRLEPEDFAVYYCQQYGD |
| | | SPPITFGQGTRLDIKRT |
| P2 | 1012 | ELVLTQSPGTLSLSPGERATLSCRASQSVSSSYLAWYQQKPGQAPR |
| | | LLIYGASSRATGIPDRFSGSGSGTDFTLTISRLEPEDFAVYYCQQY |
| | | GDSPPFFGPGTKVDIKRT |
| P3 | 1013 | ELTQSPGTLSLSPGERATLSCRASQSVSSTYLAWYQQKPGQAPRLL |
| | | IYGASSRATGIPDRFSGSGSGTDFTLTISRLEPEDFAVYYCQQYGS |
| | | SPLTFGGGTKVEIKRT |
| P4 | 1014 | ELTQSPGTLSLSPGERATLSCRASQSVSSSNLAWFQHKSGRAPRLL |
| | | IYGASNRAPDIPDRFSGSGSGTDFTLSISRLEPEDFAVYYCQRYGD |
| | | SPPITFGQGTRLEIKRT |
| P5 | 1015 | ELTQSPASLSLSPGERATLSCRASQSVGTYFAWYQQKPGQAPRLLI |
| | | YGASNRATGIPDRFSGSGSGTDFTLTVSRLEPEDFAVYYCQQYGSS |
| | | PTFGQGTKVEIKRT |
| P6 | 1016 | ELIQSPGTLFLSSGERATLSCRASQSVSSSNLAWFQHKSGRAPRLL |
| | | IYGASNRAPDIPDRFSGSGSGTDFTISISRLEPEDFAVYYCQRYGD |
| | | SPPITFGQGTRLEIKRT |
| Q1 | 1017 | ELTQSPGTLSLSPGERATLSCRASQSVSSSYLAWYQQKPGQAPRLL |
| | | IYGASSRATGIPDRFSGSGSGTDFTLTISRLEPEDFAVYYCQQYGS |
| | | SPQTFGQGTKVEIKRT |
| Q2 | 1018 | ELTQSPASLSLSPGGSATLACRASRGVNSNLAWYHQKPGQAPRLLI |
| | | YSASTRATGIPGRFSGSGFGTEFTLTINNLQSDDFGVYYCQQYDDT |
| | | PQITFGQGTRLDIKRL |
| R1 | 1019 | ELTQSPLSLPVTPGEPASISCRSSYSLLHINGYKYLDWYLQRPGQS |
| | | PQLLIYLGSNRAPGVPDRFSGSGSGTSFTLKISRVEAEDVGVYYCM |
| | | QSLQAPWTFGQGTKVEMKRT |
| S1 | 1020 | ELVLTQSPGTLSLSPGERATLSCRASQSVSSSYLAWYQQKPGQAPR |
| | | LLIYGASSRATGIPDRFSGSGSGTDFTLTISRLEPEDFAVYYCQQY |
| | | GSSPQTFGQGTKVEIKRT |
| S2 | 1087 | ELTQSPATLSLSPGERATLSCRASQSVSSRFLAWYQQKPGQAPRLL |
| | | IYGASSRATGIPDRFSGSGSGTDFTLTISRLEPEDFAVYYCQQYGS |
| | | SPQTFGQGTKVEIKRT |
| T1 | 1021 | ELTQSPGTLSLSPGERATLSCRASQSVSSSYLAWYQQKPGQAPRLL |
| | | IYGASSRATGIPDRFSGSGSGTDFTLTISRLEPEDFAVYYCQQYGS |
| | | SPQTFGQGTKVEIKRT |
| U1 | 1022 | ELTQSPSSLSASVGDRVTITCRASQSISSFLNWYQQKPGKAPKLLI |
| | | YAASSLQSGVPPRFSGSGSGTDFTLTISSLQPEDFATYYCQQSYST |
| | | PRTFGQGTKLEIKRT |
| U2 | 1088 | ELTQSPSSLSASIGDRVTIPCRASQSILNHLNWYQQKPGQPPKLLI |
| | | FAASNLQSGVPSRFSGSGSGTDFTLTISSLQTEDFATYYCQQSYST |
| | | PRTFGQGTKVEVKRT |
| U3 | 1089 | ELTQSPSSLSASVGDRVTITCRASQSIRSYLNWYQQKPGKAPNLLI |
| | | YSASNLQSGVPSRFRGSGSGTDFTLTISSLQPEDFATYYCQQSYRT |
| | | PRTFGQGTKVESKRT |
| V1 | 1023 | ELTQSPSSLSASVGDRVTITCQASQDISNFLNWYQRRPGKAPNLLI |
| | | YDATHLETGVPSRFSGSGFGTHFTLTINSLQPEDIGTYYCQHFDDV |
| | | PSFTFGPGTKVDLKRT |

[0186] Thus, the polypeptides provided herein that, alone or in combination with other polypeptides, bind HCV, purified E2 and/or the E1/E2 complex, can have an amino acid sequence that resembles a mammalian antibody light or heavy chain. For example, a polypeptide can have additional amino acid residues C-terminal to the CDR and framework sequences. The additional residues form a sequence resembling that of the constant region of the light or heavy chain of a human or other mammalian antibody. Mammalian antibody constant regions are known in the art. Examples of mammalian constant region sequences are described in Kabat et al., Sequences of proteins of immunological interest edn 5th: National Institutes of Health Publication No. 91-3242 (1991).

[0187] Thus, the C-terminal segment of a polypeptide provided herein can have one or more than one immunoglobulin domains as is typically present in the light and heavy chain constant regions of human or other mammalian antibodies. The constant region of a mammalian antibody light chain typically has one immunoglobulin domain, while the constant region of a mammalian antibody heavy chain typically has three or four immunoglobulin domains. The polypeptide also can have one or more than one cysteine residues that allow for formation of intra-chain disulfide bond between amino acid residues within a polypeptide of the invention or for formation of inter-chain disulfide bonds between two polypeptides of the invention. Further, the polypeptide can have a region that resembles the hinge region of a mammalian antibody heavy chain. The hinge region, when present in a polypeptide provided herein, is located between the first and second immunoglobulin domains and can have from 10 to over 60 amino acid residues. A portion of the hinge region can adopt a random and flexible conformation allowing for molecular motion.

[0188] In instances where the constant region is included in the polypeptides that, alone or in combination with other polypeptides, bind HCV, the constant region can have an amino acid sequence of a constant region of any of the immunoglobulin classes. The constant region can be from the light chain or heavy chain, including any known in the art. Exemplary Fab′ human consensus constant region sequences include, for example, those provided within the genebank of the National Center for Biotechnology Information. Typically, the polypeptide contains a constant region from an IgG immunoglobulin, such IgG1, IgG2, IgG3 or IgG4. For example, a polypeptide that, alone or in combination with other polypeptides, binds HCV, can contain a CDR with a sequence set forth in any of SEQ ID NOS: 78-308, 725-834 and 1090-1133 and an IgG1 constant region, such as, for example, a light chain kappa with a sequence set forth in SEQ ID NO:1364, or a heavy chain constant region. Exemplary of heavy chain constant regions are CH1, CH2, CH3 and hinge regions. For example, a polypeptide can contain the IgG1 CH1 region set forth in SEQ ID NO:1362, or the IgG1 hinge-CH2-CH3 region set forth in SEQ ID NO:1363.

[0189] In instances where the polypeptide has a CDR triplet spaced with antibody framework sequences, it can have a structure like the variable region of an antibody and can mimic, or in certain examples is, the variable region of a human or other mammalian antibody. If the polypeptide is composed of CDR triplets and framework sequences from the light or heavy chain groups as discussed above, the polypeptide is a variable region of a human monoclonal antibody. If the appropriate constant region sequence is added, the polypeptide has a structure mimicking, or is, a complete single light or heavy chain of a human or other mammalian antibody. For example, with addition of the constant region sequences from a Fab, a Fab′, or an IgG, IgE, IgA, IgD or IgM antibody, to a polypeptide of the invention, the polypeptide is a heavy or light single chain Fab or Fab′ fragment or a full-length single chain IgG, IgE, IgA, IgD or IgM molecule.

[0190] 2. Anti-HCV Antibodies

[0191] Included among the polypeptides provided herein are antibodies and fragments thereof. For example, any two or more polypeptides described above can associate through covalent and non-covalent interactions to form a structure resembling a mammalian antibody. Covalent interactions are in the form of disulfide bonds, and non-covalent interactions are hydrophobic interactions. The two polypeptides can be any combination of polypeptides, e.g. two polypeptides that resemble mammalian antibody light chains, two polypeptides that resemble mammalian antibody heavy chains, two mixed CDR chains, or a polypeptide that resembles a mammalian antibody light chain and one that resembles a mammalian antibody heavy chain. For example, when a polypeptide described above that resembles a light chain and polypeptide described above that resembles a heavy chain polypeptide associate, the resulting complex can have a construction like that of a Fab or a Fab′ fragment. Two Fab′ fragments can associate to form a F(ab′)₂ fragment. When the F(ab)ₓ fragments are attached to the appropriate number of constant region Fc domain of a human or other mammalian immunoglobulin, it is a complete human or other mammalian monoclonal antibody. Thus, a polypeptide that resembles a mammalian antibody light chain can associate with a polypeptide that resembles a mammalian antibody heavy chain to form a monovalent antigen-binding fragment (Fab). In addition, two such dimers can associate to form a bivalent F(ab′)₂ or to form a structure resembling a mammalian IgG, IgE, IgA, IgD or IgM antibody.

[0192] Each polypeptide in an antibody can have three CDRs, i.e. a CDR triplet, with framework sequences as discussed above. The three CDRs in one single polypeptide chain can be selected from the light CDR group, and the three CDRs in the other polypeptide chain can be selected from the heavy CDR group. Each polypeptide can have matched triplets and framework regions as discussed above. For example, CDR1 sequences with Framework 1 sequences, CDR2 sequences with Framework 2 sequences, and CDR3 sequences with Framework 3 sequences. Additional examples include light chain CDR1 and light chain Framework 1 sequences or heavy chain CDR1 and heavy chain Framework 1 sequences; light chain CDR2 and light chain Framework 2 sequences or heavy chain CDR2 and heavy chain Framework 2 sequences; and light chain CDR3 with light chain Framework 3 sequences or heavy chain CDR3 and heavy chain Framework 3 sequences.

[0193] In the antibodies provided herein, one polypeptide can have a light chain constant region, and the other polypeptide can have a heavy chain constant region such that the two polypeptides associate to form an antigen-binding fragment (Fab). Two Fabs also can associate through inter-chain disulfide bonding between the heavy chain constant regions to form a bivalent Fab, i.e. F(ab′)₂. Thus, in a Fab or a F(ab′)₂ provided herein, one polypeptide can have light chain CDR, framework, and constant region sequences described herein and one polypeptide can have heavy chain CDR, framework, and constant region sequences as described herein.

[0194] The antibodies provided herein can contain any one or more of the polypeptides described above. Thus, the antibodies provided herein contain one or more CDRs set forth in SEQ ID NOS:78-308, 725-834 and 1090-1133. In particular examples, the antibodies contain one or more CDRs with a sequence of amino acids set forth in any of SEQ ID NOS: 725-834 and 1090-1133. Included among such antibodies are full length antibodies, or antigen-binding fragments thereof, including, for example, scFv, Fab, Fab′, F(ab′)₂, Fv, dsFv, diabody, Fd, or Fd′ fragments. The antibodies or antigen-binding fragments thereof selectively bind to HCV. In some examples, the antibodies or antigen-binding fragments thereof bind to E2. For example, the antibodies can bind to a discontinuous conformational epitope on E2 within amino acid residues 396-424, 436-447 and 535-540. In other examples, the antibodies or antigen-binding fragments thereof selectively bind to the E1E2 complex, but do not bind to a linear epitope of E1 or to an isolated E2 polypeptide. Also included are antibodies that bind to the same epitope as any of the antibodies described herein.

[0195] a. General Structure of Antibodies

[0196] Native antibodies are usually heterotetrameric glycoproteins of about 150,000 daltons, composed of two identical light (L) chains and two identical heavy (H) chains. Each light chain is linked to a heavy chain by one covalent disulfide bond, while the number of disulfide linkages varies between the heavy chains of different immunoglobulin isotypes. Each heavy and light chain also has regularly spaced intrachain disulfide bridges. Each heavy chain has at one end a variable region (VH) followed by a number of constant regions. Each light chain has a variable region at one end (VL) and a constant region at its other end. The constant region of the light chain is aligned with the first constant region of the heavy chain, and the light chain variable region is aligned with the variable region of the heavy chain. The variable region of either chain has a triplet of hypervariable or complementarity determining regions (CDR's) spaced within a framework sequence as explained below. The framework and constant regions of the antibody have highly conserved amino acid sequences such that a species consensus sequence may typically be available for the framework and constant regions. Particular amino acid residues are believed to form an interface between the light and heavy chain variable regions (Chothia et al., J. Mol. Biol. 186, 651-63, 1985); Novotny and Haber, Proc. Natl. Acad. Sci. USA 82 4592-4596 (1985). Antibodies are produced naturally by B cells in membrane-bound and secreted forms. Antibodies specifically recognize and bind antigen epitopes through cognate interactions. Antibody binding to cognate antigens can initiate multiple effector functions, which cause neutralization and clearance of toxins, pathogens and other infectious agents.

[0197] Diversity in antibody specificity arises naturally due to recombination events during B cell development. Through these events, various combinations of multiple antibody V, D and J gene segments, which encode variable regions of antibody molecules, are joined with constant region genes to generate a natural antibody repertoire with large numbers of diverse antibodies. A human antibody repertoire contains more than 10¹⁰ different antigen specificities and thus theoretically can specifically recognize any foreign antigen. Antibodies include such naturally produced antibodies, as well as synthetically, i.e. recombinantly, produced antibodies, such as antibody fragments, including the anti-HCV antibodies or antigen-binding fragments provided herein.

[0198] In folded antibody polypeptides, binding specificity is conferred by antigen-binding site domains, which contain portions of heavy and/or light chain variable region domains. Other domains on the antibody molecule serve effector functions by participating in events such as signal transduction and interaction with other cells, polypeptides and biomolecules. These effector functions cause neutralization and/or clearance of the infecting agent recognized by the antibody. Domains of antibody polypeptides can be varied according to the methods herein to alter specific properties.

[0199] i. Structural and Functional Domains of Antibodies

[0200] Full-length antibodies contain multiple chains, domains and regions. A full length conventional antibody contains two heavy chains and two light chains, each of which contains a plurality of immunoglobulin (Ig) domains. An Ig domain is characterized by a structure called the Ig fold, which contains two beta-pleated sheets, each containing anti-parallel beta strands connected by loops. The two beta sheets in the Ig fold are sandwiched together by hydrophobic interactions and a conserved intra-chain disulfide bond. The Ig domains in the antibody chains are variable (V) and constant (C) region domains. Each heavy chain is linked to a light chain by a disulfide bond, and the two heavy chains are linked to each other by disulfide bonds. Linkage of the heavy chains is mediated by a flexible region of the heavy chain, known as the hinge region.

[0201] Each full-length conventional antibody light chain contains one variable region domain (V_{L}) and one constant region domain (C_{L}). Each full-length conventional heavy chain contains one variable region domain (V_{H}) and three or four constant region domains (C_{H}) and, in some cases, hinge region. Owing to recombination events discussed above, nucleic acid sequences encoding the variable region domains differ among antibodies and confer antigen-specificity to a particular antibody. The constant regions, on the other hand, are encoded by sequences that are more conserved among antibodies. These domains confer functional properties to antibodies, for example, the ability to interact with cells of the immune system and serum proteins in order to cause clearance of infectious agents. Different classes of antibodies, for example IgM, IgD, IgG, IgE and IgA, have different constant regions, allowing them to serve distinct effector functions.

[0202] Each variable region domain contains three portions called complementarity determining regions (CDRs) or hypervariable (HV) regions, which are encoded by highly variable nucleic acid sequences. The CDRs are located within the loops connecting the beta sheets of the variable region Ig domain. Together, the three heavy chain CDRs (CDR1, CDR2 and CDR3) and three light chain CDRs (CDR1, CDR2 and CDR3) make up a conventional antigen-binding site (antibody combining site) of the antibody, which physically interacts with cognate antigen and provides the specificity of the antibody. A whole antibody contains two identical antibody combining sites, each made up of CDRs from one heavy and one light chain. Because they are contained within the loops connecting the beta strands, the three CDRs are non-contiguous along the linear amino acid sequence of the variable region. Upon folding of the antibody polypeptide, the CDR loops are in close proximity, making up the antigen combining site. The beta sheets of the variable region domains form the framework regions (FRs), which contain more conserved sequences that are important for other properties of the antibody, for example, stability.

[0203] ii. Antibody Fragments

[0204] Antibodies provided herein include antibody fragments, which are derivatives of full-length antibodies that contain less than the full sequence of the full-length antibodies but retain at least a portion of the specific binding abilities of the full-length antibody. The antibody fragments also can include antigen-binding portions of an antibody that can be inserted into an antibody framework (e.g., chimeric antibodies) in order to retain the binding affinity of the parent antibody. Examples of antibody fragments include, but are not limited to, Fab, Fab′, F(ab′)2, single-chain Fvs (scFv), Fv, dsFv, diabody, Fd and Fd′ fragments, and other fragments, including modified fragments (see, for example, Methods in Molecular Biology, Vol 207: Recombinant Antibodies for Cancer Therapy Methods and Protocols (2003); Chapter 1; p 3-25, Kipriyanov). Antibody fragments can include multiple chains linked together, such as by disulfide bridges and can be produced recombinantly. Antibody fragments also can contain synthetic linkers, such as peptide linkers, to link two or more domains. Methods for generating antigen-binding fragments are well-known in the art and can be used to modify any antibody provided herein. Fragments of antibody molecules can be generated, such as for example, by enzymatic cleavage. For example, upon protease cleavage by papain, a dimer of the heavy chain constant regions, the Fc domain, is cleaved from the two Fab regions (i.e. the portions containing the variable regions).

[0205] Single chain antibodies can be recombinantly engineered by joining a heavy chain variable region (V_{H}) and light chain variable region (V_{L}) of a specific antibody. The particular nucleic acid sequences for the variable regions can be cloned by standard molecular biology methods, such as, for example, by polymerase chain reaction (PCR) and other recombination nucleic acid technologies. Methods for producing sFvs are described, for example, by Whitlow and Filpula (1991) Methods, 2: 97-105; Bird et al. (1988) Science 242:423-426; Pack et al. (1993) Bio/Technology 11:1271-77; and U.S. Pat. Nos. 4,946,778, 5,840,300, 5,667,988, 5,658,727, 5,258,498). Single chain antibodies also can be identified by screening single chain antibody libraries for binding to a target antigen. Methods for the construction and screening of such libraries are well-known in the art.

[0206] b. Exemplary Anti-HCV Antibodies

[0207] Provided herein are anti-HCV antibodies and antigen-binding fragments thereof that bind to HCV. Typically, the antibodies neutralize a hepatitis C virus from at least one genotype, such as genotype 1, 2, 3, 4, 5 or 6, or a subtype thereof. In some instances, the antibody or antigen-binding fragment thereof neutralize hepatitis C virus from 2, 3, 4, 5, 6 or more genotypes or subtypes thereof. The anti-HCV antibodies provided herein contain one or more polypeptides described above. Thus, the antibodies provided herein contain one or more CDRs set forth in SEQ ID NOS:78-308, 725-834 and 1090-1133. In particular examples, the antibodies contain one or more CDRs with a sequence of amino acids set forth in any of SEQ ID NOS: 725-834 and 1090-1133.

[0208] The anti-HCV antibodies or antigen-binding fragment thereof provided include monoclonal antibodies, multispecific antibodies, bispecific antibodies, human antibodies, humanized antibodies, camelised antibodies, chimeric antibodies, single-chain Fvs (scFv), single chain antibodies, single domain antibodies, Fab fragments, F(ab′) fragments, disulfide-linked Fvs (sdFv), and anti-idiotypic (anti-Id) antibodies, intrabodies, or antigen-binding fragments of any of the above. In particular, antibodies include immunoglobulin molecules and immunologically active fragments of immunoglobulin molecules, i.e., molecules that contain an antigen-binding site. Immunoglobulin molecules can be of any type (e.g., IgG, IgE, IgM, IgD, IgA and IgY), class (e.g., IgG1, IgG2, IgG3, IgG4, IgA1 and IgA2) or subclass.

[0209] The anti-HCV antibodies or antigen-binding fragments thereof provided herein can contain any constant region known in the art, such as any human constant region known in the art, including, but not limited to, human light chain kappa (κ), human light chain lambda (λ), the constant region of IgG1, the constant region of IgG2, the constant region of IgG3 or the constant region of IgG4.

[0210] Exemplary of the anti-HCV antibodies provided herein include the Fab fragments set forth in Tables 3 and 4, including A, B1, B2, B3, B4, B5, B6a, B6b, B6c, B7, C1, C1*, C2, C2*, C3, C4, C5, C6, D1, D2, D3, D4, E, E2, E3, E4, F, G, H1, H1*, H1**, H2, H3, I, J1, J2, J3, J3*, J4, J5, K, L1, L2, L3, L4, L5, L6, L7, M, N1, N2, N3, N4, O1, P1, P1a, P2, P3, P4, P5, P6, Q1, Q2, R1, S1, S2, T1, U1, U2, U3 and V1 Fabs. Thus, exemplary of the anti-HCV antibodies provided herein are those with a Fab heavy chain with a sequence of amino acids set forth in any of SEQ ID NOS:1-31, 987-1004 and 1062-1075, and a Fab light chain with a sequence of amino acids set forth in any of SEQ ID NOS: 32-77, 1005-1023, 1076-1089 and 1365. The heavy chain of Fab E4, with a sequence set forth in SEQ ID NO:1068, can be combined with the light chain of any of the other Fabs provided herein to generate an anti-HCV Fab. In particular examples, the heavy chain of Fab E4 is combined with the light chain of Fab E (SEQ ID NO:48), Fab E2 (SEQ ID NO:1080) or Fab E3 (SEQ ID NO:1081) to generate an anti-HCV Fab. These Fabs were isolated from a phage display library made from the bone marrow of a patient with chronic HCV infection (genotype 1a) and Sjögren's Syndrome (see Examples 1-5), by panning against E1E2 complex.

[0211] Many of the Fabs exhibit robust neutralizing activity, as determined by neutralizing of binding (NOB) assays (e.g. 50% at 0.5˜1.0 μg/mL; see, e.g., Examples 2 and 3). The Fabs and IgGs made from the Fabs were characterized and found to bind conformational E2 epitopes or conformational epitopes on the E1E2 complex. For example, Fabs B1, B2, B3, D1, D2, D3, D4 and E bind the antigenic region (AR) 1 on E2. The antibodies bind better to E2 alone than the E1E2 complex, as do Fabs F and G, which bind AR2. Fabs A, C1, C2, C3, C4, C5, C6, H1, H2, H3, I, J1, J2, J3, J4, L1, L2, L3, L4 and M bind AR3. These antibodies bind better to the E1E2 complex than to E2. The discontinuous epitopes in AR3 are formed by at least three segments between amino acids 396-424, 436-447 and 523-540; the first and third segments also contribute to the CD81-binding domain of E2.

[0212] Fab U1 competes strongly with AR3-binding antibodies, and partially with ARIA, which is the full length IgG1 of Fab B2. Fabs N1, N2, N3, N4, O1, P1, P1a, P2, P3, P4, P5, P6, Q1, Q2, R1, S1, T1, and V1 do not significantly compete with any of the AR1-, AR2 or AR3-binding antibodies, indicating that they bind to a different epitope on E1 or E2. Many of these Fabs cross-react with E1E2 from different HCV isolates and genotypes. IgG1 antibodies generated from the N4 and V1 Fabs selectively bind folded E1E2, but do not bind denatured E1E2, nor E1E2 containing modifications in the E1 polypeptide that disrupt the correct folding of the E1 protein within the E1E2 complex. Thus, it appears that N4 and V1 selectively bind a conformational epitope presented on the E1E2 complex. Correct folding of the E1/E2 complex appears to be critical for the binding of both N4 and V1 (see Example 4). The N4 IgG and V1 IgG (and fragments thereof) recognize two distinct discontinuous epitopes on the E1/E2 complex, that are different from the epitopes located at antigenic regions (AR) 1, 2 and 3 described herein (see Example 1) and elsewhere (Law et al., (2008) Nature Med. 14:25-27).

[0213] Also included in the anti-HCV antibodies provided herein are those that bind to the same epitope as any of the antibodies described above. For example, also included are antibodies and antigen-binding fragments that bind to the same epitope as any of Fabs N1, N2, N3, N4, O1, P1, P1a, P2, P3, P4, P5, P6, Q1, Q2, R1, S1, T1, and V1. In a particular example, the antibodies bind to the same epitope as Fab N4, Q2, or V1 (or the full length IgGs thereof). Whether an antibody binds to the same epitope as another antibody can readily be determined by one of skill in the art. For example, epitopes can be mapped, such as by mutation of the antigen. In other example, competition assays, such as a competition ELISA, can be performed, such as one described in Example 1. Briefly, for example, saturating concentrations of the blocking antibody (the antibody being tested for competition) are added to the captured antigen, such as E1E2 complex, and incubated before an equal amount of the biotinylated antibody (e.g. biotinylated N1, N2, N3, N4, O1, P1, P1a, P2, P3, P4, P5, P6, Q1, Q2, R1, S1, T1, or V1) is added. The amount of biotinylated antibody that binds is then assessed and compared to the binding in the absence of the blocking antibody. Competition is determined by the percentage change in binding signals in the presence of the blocking antibody compared to the absence of the blocking antibody. Competition of 70% or more (i.e. the amount of biotinylated antibody bound to the antigen in the presence of the blocking antibody is 30% or less of the amount of the biotinylated antibody bound to the antigen in the absence of the antibody) typically is indicative that the antibodies bind to the same epitope. Thus, if competition of 70%, 71%, 72%, 73%, 74%, 75%, 80%, 85%, 90%, 95% or 100% is observed between an anti-HCV antibody and, for example, N4 IgG, then the anti-HCV antibody can be considered to bind to the same epitope as N4 IgG.

[0214] The antibodies provided herein include fragments of A, B1, B2, B3, B4, B5, B6a, B6b, B6c, B7, C1, C1*, C2, C2*, C3, C4, C5, C6, D1, D2, D3, D4, E, E2, E3, E4, F, G, H1, H1*, H1**, H2, H3, I, J1, J2, J3, J3*, J4, J5, K, L1, L2, L3, L4, L5, L6, L7, M, N1, N2, N3, N4, O1, P1, P1a, P2, P3, P4, P5, P6, Q1, Q2, R1, S1, S2, T1, U1, U2, U3 and V1 Fabs, that selectively bind E2 or E1E2, and full length antibodies, including full length IgG1 antibodies, of these Fabs. Such antibodies include chimeric antibodies, single-chain Fvs (scFv), single chain antibodies, single domain antibodies, Fab fragments, F(ab′) fragments, disulfide-linked Fvs (sdFv), anti-idiotypic (anti-Id) antibodies, intrabodies, or antigen-binding fragments of any of the above.

[0215] The anti-HCV antibodies provided herein can neutralize hepatitis C virus. For example, the antibodies can neutralize 10%, 15%, 20%, 25%, 30%, 35%, 40%, 45%, 50%, 55%, 60%, 65%, 70%, 75%, 80%, 85%, 90%, 95% or more of the virus. Further, the antibodies can neutralize one or more than one genotype, such as 1, 2, 3, 4, 5 or 6 genotypes. The antibodies or antigen-binding fragments thereof can neutralize hepatitis C virus from any one or more of genotypes 1, 2, 3, 4, 5 or 6, or any subtype thereof.

[0216] c. Additional Modifications of Anti-HCV Antibodies

[0217] The anti-HCV antibodies or antigen-binding fragments thereof provided herein can be further modified. Modifications of an anti-HCV antibody or antigen-binding fragment can improve one or more properties of the antibody, including, but not limited to, decreasing the immunogenicity of the antibody or antigen-binding fragment, improving the half-life of the antibody or antigen-binding fragment, such as reducing the susceptibility to proteolysis and/or reducing susceptibility to oxidation, and altering or improving of the binding properties of the antibody or antigen-binding fragment. Exemplary modifications include, but are not limited to, modifications of the primary amino acid sequence of the anti-HCV antibody or antigen-binding fragment thereof and alteration of the post-translational modification of the anti-HCV antibody or antigen-binding fragment thereof. Exemplary post-translational modifications include, for example, glycosylation, acetylation, pegylation, phosphorylation, amidation, derivatization with protecting/blocking group, proteolytic cleavage, linkage to a cellular ligand or other protein. Other exemplary modifications include attachment of one or more heterologous peptides to the anti-HCV antibody or antigen-binding fragment to alter or improve one or more properties of the antibody or antigen-binding fragment thereof.

[0218] Generally, the modifications do not result in increased immunogenicity of the antibody or antigen-binding fragment thereof or significantly negatively affect the binding of the antibody or antigen-binding fragment thereof to HCV. Methods of assessing the binding of the modified antibodies or antigen-binding fragments thereof to a HCV protein are provided herein and known in the art. For example, modified antibodies or antigen-binding fragments thereof can be assayed for binding to E1, E2 or E1E2 by methods such as, but not limited to, ELISA, surface plasmon resonance (SPR), or through in vitro neutralization assays.

[0219] Provided herein are methods of improving the half-life of any of the anti-HCV antibodies or antigen-binding fragments provided. Increasing the half-life of the anti-HCV antibodies or antigen-binding fragments thereof provided can increase the therapeutic effectiveness of the anti-HCV antibodies or antigen-binding fragments thereof and allow for less frequent administration of the antibodies or antigen-binding fragments thereof for prophylaxis and/or treatment, such as preventing or treating a HCV infection, preventing, treating, and/or alleviating of one or more symptoms of a HCV infection, or reducing the duration of a HCV infection.

[0220] Modification of the anti-HCV antibodies or antigen-binding fragments thereof produced herein can include one or more amino acid substitutions, deletions or additions, either from natural mutation or human manipulation from the parent antibody from which it was derived. Methods for modification of polypeptides, such as antibodies, are known in the art and can be employed for the modification of any antibody or antigen-binding fragment provided herein. In some examples, the pharmacokinetic properties of the anti-HCV antibodies or antigen-binding fragments thereof provided can be enhanced through Fc modifications by techniques known to those skilled in the art. Standard techniques known to those skilled in the art can be used to introduce mutations in the nucleotide molecule encoding an antibody or an antigen-binding fragment provided herein in order to produce a polypeptide with one or more amino acid substitutions. Exemplary techniques for introducing mutations include, but are not limited to, site-directed mutagenesis and PCR-mediated mutagenesis.

[0221] The anti-HCV antibodies and fragments thereof provided herein can be modified by the attachment of a heterologous peptide to facilitate purification. Generally such peptides are expressed as a fusion protein containing the antibody fused to the peptide at the C- or N-terminus of the antibody or antigen-binding fragment thereof. Exemplary peptides commonly used for purification include, but are not limited to, hexa-histidine peptides, hemagglutinin (HA) peptides, and flag tag peptides (see e.g., Wilson et al. (1984) Cell 37:767; Witzgall et al. (1994) Anal Biochem 223:2, 291-8). The fusion does not necessarily need to be direct, but can occur through a linker peptide. In some examples, the linker peptide contains a protease cleavage site which allows for removal of the purification peptide following purification by cleavage with a protease that specifically recognizes the protease cleavage site.

[0222] The anti-HCV antibodies and fragments thereof provided herein also can be modified by the attachment of a heterologous polypeptide that targets the antibody or antigen-binding fragment to a particular cell type, either in vitro or in vivo. In some examples an anti-HCV antibody or antigen-binding fragment thereof provided herein can be targeted to a particular cell type by fusing or conjugating the antibody or antigen-binding fragment thereof to an antibody specific for a particular cell surface receptor or other polypeptide that interacts with a specific cell receptor.

[0223] In some examples, an anti-HCV antibody or antigen-binding fragment thereof provided herein can be targeted to a target cell surface and/or taken up by the target cell by fusing or conjugating the antibody or antigen-binding fragment thereof to a peptide that binds to cell surface glycoproteins, such as a protein transduction domain (e.g. a TAT peptide). Exemplary protein transduction domains include, but are not limited to, PTDs derived from proteins such as human immunodeficiency virus 1 (HIV-1) TAT (Ruben et al. (1989) J. Virol. 63:1-8), the herpes virus tegument protein VP22 (Elliott and O'Hare (1997) Cell 88:223-233), the homeotic protein of Drosophila melanogaster Antennapedia (Antp) protein (Penetratin PTD; Derossi et al. (1996) J. Biol. Chem. 271:18188-18193), the protegrin 1 (PG-1) anti-microbial peptide SynB (e.g., SynB1, SynB3, and Syn B4; Kokryakov et al. (1993) FEBS Lett. 327:231-236) and basic fibroblast growth factor Pans (1994) FASEB J. 8:841-847). PTDs also include synthetic PTDs, such as, but not limited to, polyarginine peptides (Futaki et al. (2003) J. Mol. Recognit. 16:260-264; Suzuki et al. (2001) J. Biol. Chem. 276:5836-5840), transportan (Pooga et al. (1988) FASEB J. 12:67-77; Pooga et al. (2001) FASEB J. 15:1451-1453), MAP (Oehlke et al. (1998) Biochim. Biophys. Acta. 1414:127-139), KALA (Wyman et al. (1997) Biochemistry 36:3008-3017) and other cationic peptides, such as, for example, various β-cationic peptides (Akkarawongsa et al. (2008) Antimicrob. Agents and Chemother. 52(6):2120-2129).

[0224] The anti-HCV antibodies and fragments thereof provided herein can be modified by the attachment of diagnostic and/or therapeutic moiety to the antibody or antigen-binding fragment thereof. The anti-HCV antibodies and fragments thereof provided herein can be modified by the covalent attachment of any type of molecule, such as a diagnostic or therapeutic molecule, to the antibody or antigen-binding fragment thereof such that covalent attachment does not prevent the antibody or antigen-binding fragment thereof from binding to its corresponding epitope. For example, an anti-HCV antibody or antigen-binding fragment thereof provided herein can be further modified by covalent attachment of a molecule such that the covalent attachment does not prevent the antibody or antigen-binding fragment thereof from binding to HCV. In some examples, the antibodies or antigen-binding fragments thereof can be recombinantly fused to a heterologous polypeptide at the N terminus or C terminus or chemically conjugated, including covalent and non-covalent conjugation, to a heterologous polypeptide or other composition. For example, the heterologous polypeptide or composition can be a diagnostic polypeptide or other diagnostic moiety or a therapeutic polypeptide or other therapeutic moiety. Exemplary diagnostic and therapeutic moieties include, but are not limited to, drugs, radionuclides, toxins, fluorescent molecules (see, e.g. International PCT Publication Nos. WO 92/08495; WO 91/14438; WO 89/12624; U.S. Pat. No. 5,314,995; and EP 396,387). Diagnostic polypeptides or diagnostic moieties can be used, for example, as labels for in vivo or in vitro detection. Therapeutic polypeptides or therapeutic moieties can be used, for example, for therapy of a viral infection, such as HCV infection, or for treatment of one or more symptoms of a viral infection.

[0225] Additional fusion proteins of the anti-HCV antibodies or antigen-binding fragments thereof provided herein can be generated through the techniques of gene-shuffling, motif-shuffling, exon-shuffling, and/or codon-shuffling (collectively referred to as “DNA shuffling”). DNA shuffling can be employed to alter the activities of anti-HCV antibodies or antigen-binding fragments thereof provided herein, for example, to produce antibodies or antigen-binding fragments thereof with higher affinities and lower dissociation rates (see, generally, U.S. Pat. Nos. 5,605,793; 5,811,238; 5,830,721; 5,834,252; and 5,837,458, and Patten et al. (1997) Curr. Opinion Biotechnol. 8:724-33; Harayama (1998) Trends Biotechnol. 16(2):76-82; Hansson et al., (1999) J. Mol. Biol. 287:265-76; and Lorenzo and Blasco (1998) Biotechniques 24(2):308-13).

[0226] The anti-HCV antibodies or antigen-binding fragments thereof can also be attached to solid supports, which are useful for immunoassays or purification of the target antigen. Exemplary solid supports include, but are not limited to, glass, cellulose, polyacrylamide, nylon, polystyrene, polyvinyl chloride or polypropylene.

[0227] i. Modifications to Reduce Immunogenicity

[0228] In some examples, the antibodies or antigen-binding fragments thereof provided herein can be further modified to reduce the immunogenicity in a subject, such as a human subject. For example, one or more amino acids in the antibody or antigen-binding fragment thereof can be modified to alter potential epitopes for human T-cells in order to eliminate or reduce the immunogenicity of the antibody or antigen-binding fragment thereof when exposed to the immune system of the subject. Exemplary modifications include substitutions, deletions and insertion of one or more amino acids, which eliminate or reduce the immunogenicity of the antibody or antigen-binding fragment thereof. Generally, such modifications do not alter the binding specificity of the antibody or antigen-binding fragment thereof for its respective antigen. Reducing the immunogenicity of the antibody or antigen-binding fragment thereof can improve one or more properties of the antibody or antigen-binding fragment thereof, such as, for example, improving the therapeutic efficacy of the antibody or antigen-binding fragment thereof and/or increasing the half-life of the antibody or antigen-binding fragment thereof in vivo.

[0229] ii. Fc Modifications

[0230] The anti-HCV antibodies or antigen-binding fragments thereof provided herein can contain wild-type or modified Fc region. As described elsewhere herein, a Fc region can be linked to an anti-HCV antigen-binding fragment provided herein. In some examples, the Fc region can be modified to alter one or more properties of the Fc polypeptide. For example, the Fc region can be modified to alter (i.e. more or less) effector functions compared to the effector function of an Fc region of a wild-type immunoglobulin heavy chain. The Fc regions of an antibody interacts with a number of Fc receptors, and ligands, imparting an array of important functional capabilities referred to as effector functions. Fc effector functions include, for example, Fc receptor binding, complement fixation, and T cell depleting activity (see e.g., U.S. Pat. No. 6,136,310). Methods of assaying T cell depleting activity, Fc effector function, and antibody stability are known in the art. For example, the Fc region of an IgG molecule interacts with the FcγRs. These receptors are expressed in a variety of immune cells, including for example, monocytes, macrophages, neutrophils, dendritic cells, eosinophils, mast cells, platelets, B cells, large granular lymphocytes, Langerhans' cells, natural killer (NK) cells, and γδ T cells. Formation of the Fc/FcγR complex recruits these effector cells to sites of bound antigen, typically resulting in signaling events within the cells and important subsequent immune responses such as release of inflammation mediators, B cell activation, endocytosis, phagocytosis, and cytotoxic attack. The ability to mediate cytotoxic and phagocytic effector functions is a potential mechanism by which antibodies destroy targeted cells. Recognition of and lysis of bound antibody on target cells by cytotoxic cells that express FcγRs is referred to as antibody dependent cell-mediated cytotoxicity (ADCC). Other Fc receptors for various antibody isotypes include FcεRs (IgE), FcαRs (IgA), and FcμRs (IgM).

[0231] Thus, a modified Fc domain can have altered affinity, including but not limited to, increased or low or no affinity for the Fc receptor. For example, the different IgG subclasses have different affinities for the FcγRs, with IgG1 and IgG3 typically binding substantially better to the receptors than IgG2 and IgG4. In addition, different FcγRs mediate different effector functions. FcγR1, FcγRIIa/c, and FcγRIIIa are positive regulators of immune complex triggered activation, characterized by having an intracellular domain that has an immunoreceptor tyrosine-based activation motif (ITAM). FcγRIIb, however, has an immunoreceptor tyrosine-based inhibition motif (ITIM) and is therefore inhibitory. Thus, altering the affinity of an Fc region for a receptor can modulate the effector functions induced by the Fc domain.

[0232] In one example, an Fc region is used that is modified for optimized binding to certain FcγRs to better mediate effector functions, such as for example, antibody-dependent cellular cytotoxicity, ADCC. Such modified Fc regions can contain modifications at one or more of amino acid residues (according to the Kabat numbering scheme, Kabat et al. (1991) Sequences of Proteins of Immunological Interest, U.S. Department of Health and Human Services), including, but not limited to, amino acid positions 249, 252, 259, 262, 268, 271, 273, 277, 280, 281, 285, 287, 296, 300, 317, 323, 343, 345, 346, 349, 351, 352, 353, and 424. For example, modifications in an Fc region can be made corresponding to any one or more of G20S, G20A, S23D, S23E, S23N, S23Q, S23T, K30H, K30Y, D33Y, R39Y, E42Y, T44H, V48I, S51E, H52D, E56Y, E56I, E56H, K58E, G65D, E67L, E67H, S82A, S82D, S88T, S108G, S108I, K110T, K110E, K110D, A111D, A114Y, A114L, A114I, I116D, I116E, I116N, I116Q, E117Y, E117A, K118T, K118F, K118A, and P180L of the exemplary Fc sequence set forth in SEQ ID NO:1605, or combinations thereof. A modified Fc region containing these mutations can have enhanced binding to an FcR such as, for example, the activating receptor FcγIIIa and/or can have reduced binding to the inhibitory receptor FcγRIIb (see e.g., US 2006/0024298). Fc regions modified to have increased binding to FcRs can be more effective in facilitating the destruction of viral (e.g. HCV) infected cells in patients.

[0233] In some examples, the antibodies or antigen-binding fragments provided herein can be further modified to improve the interaction of the antibody or antigen-binding fragment thereof with the FcRn receptor in order to increase the in vivo half-life and pharmacokinetics of the antibody or antigen-binding fragment thereof (see, e.g. U.S. Pat. No. 7,217,797, U.S Pat. Pub. Nos. 2006/0198840 and 2008/0287657). FcRn is the neonatal FcR, the binding of which recycles endocytosed antibody or antigen-binding fragment thereof from the endosomes back to the bloodstream. This process, coupled with preclusion of kidney filtration due to the large size of the full length molecule, results in favorable antibody serum half-lives ranging from one to three weeks. Binding of Fc to FcRn also plays a role in antibody transport.

[0234] Exemplary modifications of the Fc region include but are not limited to, mutation of the Fc region described in U.S. Pat. No. 7,217,797; U.S Pat. Pub. Nos. 2006/0198840, 2006/0024298 and 2008/0287657, and International Patent Pub. No. WO 2005/063816, such as mutations at one or more of amino acid residues (Kabat numbering, Kabat et al. (1991)) 251-256, 285-90, 308-314, in the C_{H}2 domain and/or amino acids residues 385-389, and 428-436 in the C_{H}3 domain of the Fc heavy chain constant region, where the modification alters Fc receptor binding affinity and/or serum half-life relative to unmodified antibody or antigen-binding fragment thereof. In some examples, the Fc region is modified at one or more of amino acid positions 250, 251, 252, 254, 255, 256, 263, 308, 309, 311, 312 and 314 in the C_{H}2 domain and/or amino acid positions 385, 386, 387, 389, 428, 433, 434, 436, and 459 in the C_{H}3 domain of the Fc heavy chain constant region. Such modifications correspond to amino acids Gly21, Pro22, Ser23, Phe25, Leu26, Phe27, Thr34, Pro75, Arg76, Glu78, Gln79, and Asn81 in the C_{H}2 domain and amino acids Gln146, Val147, Ser148, Thr150, Ser184, Gly 186, Ser187, Phe189, and Met212 in the C_{H}3 domain in an exemplary Fc sequence set forth in SEQ ID NO:1605. In some examples, the modification is at one or more surface-exposed residues, and the modification is a substitution with a residue of similar charge, polarity or hydrophobicity to the residue being substituted.

[0235] In particular examples, a Fc heavy chain constant region is modified at one or more of amino acid positions 251, 252, 254, 255, and 256 (Kabat numbering), where position 251 is substituted with Leu or Arg, position 252 is substituted with Tyr, Phe, Ser, Trp or Thr, position 254 is substituted with Thr or Ser, position 255 is substituted with Leu, Gly, Ile or Arg, and/or position 256 is substituted with Ser, Arg, Gln, Glu, Asp, Ala, Asp or Thr. In some examples, a Fc heavy chain constant region is modified at one or more of amino acid positions 308, 309, 311, 312, and 314, where position 308 is substituted with Thr or Ile, position 309 is substituted with Pro, position 311 is substituted with serine or Glu, position 312 is substituted with. Asp, and/or position 314 is substituted with Leu. In some examples, a Fc heavy chain constant region is modified at one or more of amino acid positions 428, 433, 434, and 436, where position 428 is substituted with Met, Thr, Leu, Phe, or Ser, position 433 is substituted with Lys, Arg, Ser, Ile, Pro, Gln, or His, position 434 is substituted with Phe, Tyr, or His, and/or position 436 is substituted with His, Asn, Asp, Thr, Lys, Met, or Thr. In some examples, a Fc heavy chain constant region is modified at one or more of amino acid positions 263 and 459, where position 263 is substituted with Gln or Glu and/or position 459 is substituted with Leu or Phe.

[0236] In some examples, a Fc heavy chain constant region can be modified to enhance binding to the complement protein C1q. In addition to interacting with FcRs, Fc also interact with the complement protein C1q to mediate complement dependent cytotoxicity (CDC). C1q forms a complex with the serine proteases C1r and C1s to form the C1 complex. C1q is capable of binding six antibodies, although binding to two IgGs is sufficient to activate the complement cascade. Similar to Fc interaction with FcRs, different IgG subclasses have different affinity for C1q, with IgG1 and IgG3 typically binding substantially better than IgG2 and IgG4. Thus, a modified Fc having increased binding to C1q can mediate enhanced CDC, and can enhance destruction of viral (e.g., HCV) infected cells. Exemplary modifications in an Fc region that increase binding to C1q include, but are not limited to, amino acid modifications at positions 345 and 253 (Kabat numbering).

[0237] In another example, a variety of Fc mutants with substitutions to reduce or ablate binding with FcγRs also are known. Such muteins are useful in instances where there is a need for reduced or eliminated effector function mediated by Fc. This is often the case where antagonism, but not killing of the cells bearing a target antigen is desired. Exemplary of such an Fc is an Fc mutein described in U.S. Pat. No. 5,457,035, which is modified at amino acid positions 248, 249 and 251 (Kabat numbering). In an exemplary Fc sequence set forth in SEQ ID NO:1605, amino acid 19 is modified from Leu to Ala, amino acid 20 is modified from Leu to Glu, and amino acid 22 is modified from Gly to Ala. Similar mutations can be made in any Fc sequence such as, for example, the exemplary Fc sequence. This mutein exhibits reduced affinity for Fc receptors.

[0238] The antibodies or antigen-binding fragments thereof provided herein can be engineered to contain modified Fc regions. For example, methods for fusing or conjugating polypeptides to the constant regions of antibodies (i.e. making Fc fusion proteins) are known in the art and described in, for example, U.S. Pat. Nos. 5,336,603, 5,622,929, 5,359,046, 5,349,053, 5,447,851, 5,723,125, 5,783,181, 5,908,626, 5,844,095, and 5,112,946; EP 307,434; EP 367,166; EP 394,827; PCT publications WO 91/06570, WO 96/04388, WO 96/22024, WO 97/34631, and WO 99/04813; Ashkenazi et al. (1991) Proc. Natl. Acad. Sci. USA 88:10535-10539; Traunecker et al. (1988) Nature 331:84-86; Zheng et al. (1995) J. Immunol. 154:5590-5600; and Vil et al. (1992) Proc. Natl. Acad. Sci. USA 89:11337-11341 (1992) and described elsewhere herein. In some examples, a modified Fc region having one or more modifications that increases the FcRn binding affinity and/or improves half-life can be fused to an anti-HCV antibody or antigen-binding fragment thereof provided herein.

[0239] iii. Pegylation

[0240] The anti-HCV antibodies or antigen-binding fragments thereof provided herein can be conjugated to polymer molecules such as high molecular weight polyethylene glycol (PEG) to increase half-life and/or improve their pharmacokinetic profiles. Conjugation can be carried out by techniques known to those skilled in the art. Conjugation of therapeutic antibodies with PEG has been shown to enhance pharmacodynamics while not interfering with function (see, e.g., Deckert et al., Int. J. Cancer 87: 382-390, 2000; Knight et al., Platelets 15: 409-418, 2004; Leong et al., Cytokine 16: 106-119, 2001; and Yang et al., Protein Eng. 16: 761-770, 2003). PEG can be attached to the antibodies or antigen-binding fragments with or without a multifunctional linker either through site-specific conjugation of the PEG to the N- or C-terminus of the antibodies or antigen-binding fragments or via epsilon-amino groups present on lysine residues. Linear or branched polymer derivatization that results in minimal loss of biological activity can be used. The degree of conjugation can be monitored by SDS-PAGE and mass spectrometry to ensure proper conjugation of PEG molecules to the antibodies. Unreacted PEG can be separated from antibody-PEG conjugates by, e.g., size exclusion or ion-exchange chromatography. PEG-derivatized antibodies or antigen-binding fragments thereof can be tested for binding activity to HCV antigens as well as for in vivo efficacy using methods known to those skilled in the art, for example, by immunoassays described herein.

[0241] iv. Conjugation of a Detectable Moiety

[0242] In some examples, the anti-HCV antibodies and antibody fragments provided herein can be further modified by conjugation to a detectable moiety. The detectable moieties can be detected directly or indirectly. Depending on the detectable moiety selected, the detectable moiety can be detected in vivo and/or in vitro. The detectable moieties can be employed, for example, in diagnostic methods for detecting exposure to HCV or localization of HCV or binding assays for determining the binding affinity of the anti-HCV antibody or antigen-binding fragment thereof for HCV. The detectable moieties also can be employed in methods of preparation of the anti-HCV antibodies, such as, for example, purification of the antibody or antigen-binding fragment thereof. Typically, detectable moieties are selected such that conjugation of the detectable moiety does not interfere with the binding of the antibody or antigen-binding fragment thereof to the target epitope. Generally, the choice of the detectable moiety depends on sensitivity required, ease of conjugation with the compound, stability requirements, available instrumentation, and disposal provisions. One of skill in the art is familiar with labels and can identify a detectable label suitable for and compatible with the assay employed. Methods of labeling antibodies with detectable moieties are known in the art and include, for example, recombinant and chemical methods.

[0243] The detectable moiety can be any material having a detectable physical or chemical property. Such detectable labels have been well-developed in the field of immunoassays and, in general, most any label useful in such methods can be applied in the methods provided. Thus, a label is any composition detectable by spectroscopic, photochemical, biochemical, immunochemical, electrical, optical or chemical means. Useful labels include, but are not limited to, fluorescent dyes (e.g., fluorescein isothiocyanate, Texas red, rhodamine, and the like), radiolabels (e.g., ³H, ¹²⁵I, ³⁵S, ¹⁴C, or ³²P), in particular, gamma and positron emitting radioisotopes (e.g., ¹⁵⁷Gd, ⁵⁵Mn, ¹⁶²Dy, ⁵²Cr, and ⁵⁶Fe), metallic ions (e.g., ¹¹¹In, ⁹⁷Ru, ⁶⁷Ga, ⁶⁸Ga, ⁷²As, ⁸⁹Zr, and ²⁰¹Ti), enzymes (e.g., horse radish peroxidase, alkaline phosphatase and others commonly used in an ELISA), electron transfer agents (e.g., including metal binding proteins and compounds); luminescent and chemiluminescent labels (e.g., luciferin and 2,3-dihydrophthalazinediones, e.g., luminol), magnetic beads (e.g., DYNABEADS™), and colorimetric labels such as colloidal gold or colored glass or plastic beads (e.g., polystyrene, polypropylene, latex, etc.). For a review of various labeling or signal producing systems that can be used, see e.g. U.S. Pat. No. 4,391,904.

[0244] v. Conjugation of a Therapeutic Moiety

[0245] In some examples, anti-HCV antibodies and antigen-binding fragments provided herein can be further modified by conjugation to a therapeutic moiety. Exemplary therapeutic moieties include, but are not limited to, a cytotoxin (e.g., a cytostatic or cytocidal agent), a therapeutic agent (such as a cytokine or interferon) or a radioactive metal ion (e.g., alpha-emitters). Exemplary cytotoxins or cytotoxic agents include, but are not limited to, any agent that is detrimental to cells, such as, but not limited to, paclitaxol, cytochalasin B, gramicidin D, ethidium bromide, emetine, mitomycin, etoposide, tenoposide, vincristine, vinblastine, colchicin, doxorubicin, daunorubicin, dihydroxy anthracin dione, mitoxantrone, mithramycin, actinomycin D, 1-dehydrotestosterone, glucocorticoids, procaine, tetracaine, lidocaine, propranolol, and puromycin and analogs or homologs thereof. Exemplary therapeutic agents include, but are not limited to, antimetabolites (e.g., methotrexate, 6-mercaptopurine, 6-thioguanine, cytarabine, 5-fluorouracil decarbazine), alkylating agents (e.g., mechlorethamine, thioepa chlorambucil, melphalan, carmustine (BSNU) and lomustine (CCNU), cyclothosphamide, busulfan, dibromomannitol, streptozotocin, mitomycin C, and cis-dichlorodiamine platinum (II) (DDP) cisplatin), anthracyclines (e.g., daunorubicin (formerly daunomycin) and doxorubicin), antibiotics (e.g., dactinomycin (formerly actinomycin), bleomycin, mithramycin, and anthramycin (AMC)), anti-mitotic agents (e.g., vincristine and vinblastine), and antivirals, such as, but not limited to, nucleoside analogs, such as zidovudine, acyclovir, gangcyclovir, vidarabine, idoxuridine, trifluridine, and ribavirin; foscamet, amantadine, rimantadine, saquinavir, indinavir, ritonavir, and alpha-interferons.

[0246] In some examples, the anti-HCV antibodies and antibody fragments provided herein can be further modified by conjugation to a therapeutic moiety that is a therapeutic polypeptide. Exemplary therapeutic polypeptides include, but are not limited to, a toxin, such as abrin, ricin A, pseudomonas exotoxin, or diphtheria toxin; or an immunostimulatory agent, such as a cytokine, such as, but not limited to, an interferon (e.g., IFN-α, β, γ, ω), a lymphokine, a hematopoietic growth factor, such as, for example, GM-CSF (granulocyte macrophage colony stimulating factor), Interleukin-2 (IL-2), Interleukin-3 (IL-3), Interleukin-4 (IL-4), Interleukin-7 (IL-7), Interleukin-10 (IL-10), Interleukin-12 (IL-12), Interleukin-14 (IL-14), and Tumor Necrosis Factor (TNF).

[0247] vi. Modifications to Improve Binding Specificity

[0248] The binding specificity of the anti-HCV antibodies and antibody fragments provided can be altered or improved by techniques, such as phage display. Methods for phage display generally involve the use of a filamentous phage (phagemid) surface expression vector system for cloning and expressing antibody species of the library. Various phagemid cloning systems to produce combinatorial libraries have been described by others. See, for example the preparation of combinatorial antibody libraries on phagemids as described by Kang, et al., Proc. Natl. Acad. Sci., USA, 88:4363-4366 (1991); Barbas, et al., Proc. Natl. Acad. Sci., USA, 88:7978-7982 (1991); Zebedee, et al., Proc. Natl. Acad. Sci., USA, 89:3175-3179 (1992); Kang, et al., Proc. Natl. Acad. Sci., USA, 88:11120-11123 (1991); Barbas, et al., Proc. Natl. Acad. Sci., USA, 89:4457-4461 (1992); and Gram, et al., Proc. Natl. Acad. Sci., USA, 89:3576-3580 (1992), which references are hereby incorporated by reference.

[0249] In particular examples, DNA sequences encoding V_{H} and V_{L} domains are amplified from animal cDNA libraries (e.g., human or murine cDNA libraries of lymphoid tissues). The DNA encoding the V_{H} and V_{L} domains are recombined together with an scFv linker by PCR and cloned into a phagemid vector (e.g., p CANTAB 6 or pComb 3 HSS). The vector is electroporated in E. coli and the E. coli is infected with helper phage. Phage used in these methods are typically filamentous phage including fd and M13 and the V_{H} and V_{L} domains are usually recombinantly fused to either the phage gene III or gene VIII. Phage expressing an antigen-binding domain that binds to a HCV antigen, for example, HCV F protein, can be selected or identified with antigen, e.g., using labeled antigen or antigen bound or captured to a solid surface or bead. Examples of phage display methods that can be used to make the antibodies by phage display include those disclosed, for example, in Brinkman et al. (1995) J. Immunol. Methods 182:41-50; Ames et al. (1995) J. Immunol. Methods 184:177-186; Kettleborough et al. (1994) Eur. J. Immunol. 24:952-958; Persic et al. (1997) Gene 187:9-18; Burton et al. (1994) Advances in Immunology 57:191-280; PCT application No. PCT/GB91/O1 134; PCT publication Nos. WO 90/02809, WO 91/10737, WO 92/01047, WO 92/18619, WO 93/1 1236, WO 95/15982, WO 95/20401, and WO97/13844; and U.S. Pat. Nos. 5,698,426, 5,223,409, 5,403,484, 5,580,717, 5,427,908, 5,750,753, 5,821,047, 5,571,698, 5,427,908, 5,516,637, 5,780,225, 5,658,727, 5,733,743 and 5,969,108; each of which is incorporated herein by reference in its entirety.

[0250] As described in the above references, after phage selection, the antibody coding regions from the phage can be isolated and used to generate whole antibodies, including human antibodies, or any other desired antigen-binding fragment, and expressed in any desired host, including mammalian cells, insect cells, plant cells, yeast, and bacteria, e.g., as described herein. Techniques to recombinantly produce Fab, Fab′ and F(ab′)2 fragments can also be employed using methods known in the art such as those disclosed in PCT publication No. WO 92/22324; Mullinax et al. (1992) BioTechniques 12(6):864-869; Sawai et al. (1995) AJRI 34:26-34; and Better et al. (1988) Science 240: 1041-1043.

[0251] The resulting phagemid library can be manipulated to increase and/or alter the immunospecificities of the antibodies or antibody fragment of the library to produce and subsequently identify additional antibodies with improved properties, such as increased binding to a target antigen. For example, either or both the H and L chain encoding DNA can be mutagenized in a complementarity determining region (CDR) of the variable region of the immunoglobulin polypeptide, and subsequently screened for desirable immunoreaction and neutralization capabilities. The resulting antibodies can then be screened in one or more of the assays described herein for determining neutralization capacity.

[0252] For some uses, including in vivo use of antibodies in humans and in vitro detection assays, human or chimeric antibodies are used. Completely human antibodies are particularly desirable for therapeutic treatment of human subjects. Human antibodies can be made by a variety of methods known in the art including phage display methods described above using antibody libraries derived from human immunoglobulin sequences or synthetic sequences homologous to human immunoglobulin sequences. See also U.S. Pat. Nos. 4,444,887 and 4,716,111; and PCT publications WO 98/46645, WO 98/50433, WO 98/24893, WO98/16654, WO 96/34096, WO 96/33735, and WO 91/10741; each of which is incorporated herein by reference in its entirety.

[0253] 3. Methods for Producing Anti-HCV Polypeptides and Antibodies

[0254] The anti-HCV antibodies or antigen-binding fragments thereof provided herein can be generated by any suitable method known in the art for the preparation of antibodies, including chemical synthesis and recombinant expression techniques. Various combinations of host cells and vectors can be used to receive, maintain, reproduce and amplify nucleic acids (e.g. nucleic acids encoding antibodies such as the anti-HCV antibodies or antigen-binding fragments thereof provided), and to express polypeptides encoded by the nucleic acids. In general, the choice of host cell and vector depends on whether amplification, polypeptide expression, and/or display on a genetic package, such as a phage, is desired. Methods for transforming host cells are well known. Any known transformation method (e.g., transformation, transfection, infection, electroporation and sonoporation) can be used to transform the host cell with nucleic acids. Procedures for the production of antibodies, such as monoclonal antibodies and antibody fragments, such as, but not limited to, Fab fragments and single chain antibodies are well known in the art.

[0255] Monoclonal antibodies can be prepared using a wide variety of techniques known in the art including, but not limited to, the use of hybridoma, recombinant expression, phage display technologies or a combination thereof. For example, monoclonal antibodies can be produced using hybridoma techniques including those known in the art and taught for example in Harlow et al. Antibodies: A Laboratory Manual (Cold Spring Harbor Laboratory Press, 2nd ed. 1988); Hammerling, Monoclonal Antibodies and T-Cell Hybridomas 5630681 (Elsevier N.Y. 1981).

[0256] Polypeptides, such as any set forth herein, including the anti-HCV antibodies or fragments thereof provided herein, can be produced by any method known to those of skill in the art including in vivo and in vitro methods. Desired polypeptides can be expressed in any organism suitable to produce the required amounts and forms of the proteins, such as for example, needed for analysis, administration and treatment. Expression hosts include prokaryotic and eukaryotic organisms such as E. coli, yeast, plants, insect cells, mammalian cells, including human cell lines and transgenic animals (e.g., rabbits, mice, rats, and livestock, such as, but not limited to, goats, sheep, and cattle), including production in serum, milk and eggs. Expression hosts can differ in their protein production levels as well as the types of post-translational modifications that are present on the expressed proteins. The choice of expression host can be made based on these and other factors, such as regulatory and safety considerations, production costs and the need and methods for purification.

[0257] a. Nucleic Acids

[0258] Provided herein are isolated nucleic acid molecules encoding a polypeptide described above, that, alone or in combination with another polypeptide, can bind HCV. Thus, also provided are isolated nucleic acid molecules encoding an anti-HCV antibody or antigen-binding fragment thereof provided herein. In some examples, the isolated nucleic acid molecule encodes a Fab fragment that is selected from among A, B1, B2, B3, B4, B5, B6, B7, C1, C1*, C2, C2*, C3, C4, C5, C6, D1, D2, D3, D4, E, E2, E3, E4, F, G, H1, H1*, H1**, H2, H3, I, J1, J2, J3, J3*, J4, J5, K, L1, L2, L3, L4, L5, L6, L7, M, N1, N2, N3, N4, O1, P1, P1a, P2, P3, P4, P5, P6, Q1, Q2, R1, S1, S2, T1, U1, U2, U3 and V1 Fabs. In some examples, the isolated nucleic acid molecule encode a full length IgG of the A, B1, B2, B3, B4, B5, B6, B7, C1, C1*, C2, C2*, C3, C4, C5, C6, D1, D2, D3, D4, E, E2, E3, E4, F, G, H1, H1*, H1**, H2, H3, I, J1, J2, J3, J3*, J4, J5, K, L1, L2, L3, L4, L5, L6, L7, M, N1, N2, N3, N4, O1, P1, P1a, P2, P3, P4, P5, P6, Q1, Q2, R1, S1, S2, T1, U1, U2, U3 and V1 Fabs, or any antigen-binding fragment thereof. Exemplary of these nucleic acid molecules are those set forth in SEQ ID NOS: 611-641 and 1024-1042 that encode a Fab heavy chain, and those set forth in SEQ ID NOS: 642-677 and 1043-1061 that encode a Fab light chain (see Table 5 and 6).

TABLE 5
Nucleic Acids Encoding Fab Heavy Chains

| | SEQ ID | |
|---|---|---|
| Fab | NO | Nucleic Acids Encoding Fab Heavy Chains |
| A | 611 | CTCGAGCAGTCTGGGGCTGAGGTGAAGAAGCCTGGGTCCTCGGTGAAAGTC |
| | | TCCTGCAAGGCGTCTGGGGGCACCTTCAGCAGCTTTGTTATCAACTGGGTG |
| | | CGACAGGCCCCTGGACAAGGGCTAGAGTGGGTGGGAGGGATCTTCCAGGCC |
| | | CCCGGACCAGAGCGTGAGTGGCTGCGGGACATTAACCCAATCTCTGGGACG |
| | | ATAAACTACGCACAGAGGTTCCAGGGCAGAGTCACGATGACCGCGGACGAA |
| | | TCCATGACCACAGTCTACATGGAGCTGAGCAGTCTGAGATCTGAAGACACG |
| | | GCCATGTATTACTGTGCGAGAGAAAACAAATTCAGATACTGTCGTGGTGGT |
| | | AGTTGCTACTCTGGTGCTTTTGATATGTGGGGCCAGGGGACAATGGTCACC |
| | | GTCTCTTCAGCCTCC |
| B1 | 612 | CTCGAGCAGTCTGGGGCAGAGGTGAAGAAGCCGGGGTCCTCAGTGAAAGTC |
| | | TCCTGCAGGGCCTCTGGAAGCCCCTTTGGTAGTTACACGATCACTTGGGTG |
| | | CGACAGGCCCCTGGACAAGGACTTGAGTGGATGGGAGGAATCATCCTGATG |
| | | ACTGGTAAAGCGAACTACGCACAGAAGTTCCAGGGCAGAGTCACGATCACT |
| | | GCGGACAGATCAACGACCACAGCCTACATGGAAATGAGCAGCCTGACATCT |
| | | GACGACACGGCCATTTATTACTGTGCGAGAGATCCCTATGTATATGCAGGG |
| | | GATGACGTGTGGTCTTTGTCTCGGTGGGGCCAGGGAACCCTGGTTATCGTC |
| | | TCCTCAGCCTCC |
| B2 | 613 | CTCGAGCAGTCTGGGGCAGAGGTGAAGAAGCCGGGGTCCTCAGTGAAAGTG |
| | | TCCTGCAGGGCCTCTGGAAGCCCCTATAGTAGTTACACGATCACTTGGGTG |
| | | CGACAGGCCCCTGGACAAGGACTTGAGTGGATGGGAGGAATCATCCTGATG |
| | | ACTGGTAAAGCGAACTACGCACAGAAGTTCCAGGGCAGAGTCACCATCACT |
| | | GCGGACAGAGCAACGGCCACAGCCTACATGGAAATGAGCAGCCTGACATCT |
| | | GACGACACGGCCATATATTACTGTGCGAGAGATCCCTATGTTTATGCAGGG |
| | | GATGACGTGCGGTCTTTGTCTCGGTGGGGCCAGGGAACCCCGGTCATCGTC |
| | | TCCTCAGCCTCC |
| B3 | 614 | CTCGAGCAGTCTGGGGCAGAGGTGAAGAAGCCGGGGTCCTCAGTGAAAGTG |
| | | TCCTGCAGGGCCTCTGGAAGCCCCTATAGTAGTTACACGATCACTTGGGTG |
| | | CGACAGGCCCCTGGACAAGGACTTGAGTGGATGGGAGGAATCATCCTGATG |
| | | ACTGGTAAAGCGAACTACGCACAGAAGTTCCAGGGCAGAGTCACCATCACT |
| | | GCGGACAGAGCAACGGCCACAGCCTACATGGAAATGAGCAGCCTGACATCT |
| | | GACGACACGGCCATATATTACTGTGCGAGAGATCCCTATGTTTATGCAGGG |
| | | GATGACGTGTGGTCTTTGTCTCGGTGGGGCCAGGGAACCCCGGTCATCGTC |
| | | TCCTCAGCCTCC |
| C1 & C1* | 615 | CTCGAGCAGTCTGGGGCTGAGGTGAAGACGCCTGGGTCCTCGGTGAGGGTC |
| | | TCCTGCAGGCCTCCTGGAGGCAACTTCAACAGTTATAGTATAAACTGGGTC |
| | | CGACAGGCCCCTGGACACGGCCTTGAGTGGGTGGGGACTTTCATCCCTATG |
| | | TTTGGAACCTCAAAGTACGCGCAGAAGTTTCAGGGGAGAGTCACGATTACC |
| | | GCGGACGGGTCCTCGGGCACCGCTTACATGGACCTGAACAGCCTGAGATCT |
| | | GACGACACGGCCTTTTACTACTGTGTGCGTCCTGAAACGCCCAGATATTGT |
| | | AGTGGCGGTTTCTGCTATGGTGAGTTTGACAACTGGGGCCAGGGAACCCTG |
| | | GTCACCGTCTCCTCAGCCTCC |
| C2 & C2* | 616 | CTCGAGCAGTCTGGGGCTGAAGTGAAGAAGCCTGGGTCTTCGGTGAGAGTC |
| | | TCCTGCAGGGCTCCTGGTGGCACCTTCAACAGCTATAGTGTGAACTGGGTC |
| | | CGACAGGCCCCTGGGCACGGCCTTGAGTGGGTGGGGACGCTCATCCCTATG |
| | | TTTGGTACCTCAAGTTACGCGCAGAAGTTCCAGGGGAGAGTCACCATTACC |
| | | GCGGACGGGTCCTCGGGCACCGCCTACATGGAACTGAACAGCCTGAGATCT |
| | | GACGACACGGCCGTCTACTACTGTGTGCGACCTGAAACGCCCAGATATTGT |
| | | CGTGGCGGTTTCTGCTATGGTGAATTTGACAACTGGGGCCAGGGAACCCTG |
| | | GTCACCGTCTCCTCGGCCTCC |
| C3 | 617 | CTCGAGCAGTCTGGGGCTGAGGTGAAGGAGCCTGGGTCCTCGGTGAGGGTC |
| | | TCCTGCAGGGCTCCTGGAGGCACCTTCAACAGCTATAGTATAAATTGGGTC |
| | | CGACAGGCCCCTGGACACGGCCTTGAGTGGGTGGGGACGCTCATCCCTATG |
| | | TTTGGTACCTCAAACTACGCGCAGAAGTTCCAGGGGAGAGTCACCATTACC |
| | | GCGGACGGGTCCTCGGGCACCGCCTACATGGAGCTGAACAGCCTGAGATCT |
| | | GACGACACGGCCGTATACTACTGTGTGCGACCTGAAACGCCCAGATATTGT |
| | | AGTGGCGGTGTCTGCTATGGTGAATTTGACAACTGGGGCCAGGGAACCCTG |
| | | GTCACCGTCTCCTCAGCCTCC |
| C4 | 618 | CTCGAGTCTGGGGCTGAGGTGAAGAAGCCTGGGTCCTCGGTGAGGGTCTCC |
| | | TGCAGGCCTCCTGGAGGCACCTTCAATAGCTATAGTATAAACTGGGTCCGA |
| | | CAGGCCCCTGGACACGGCCTTGAGTGGGTGGGGACGATCATCCCTATGTTT |
| | | GGAACCTCAAAGTACGCGCAGAAGTTGCAGGGGAGAGTCACGATTACCGCG |
| | | GACGGGTCCTCGGGCACCGCTTACATGGAGCTGAACAGCCTGAGATCTGAC |
| | | GACACGGCCGTATATTACTGTGTGCGACCTGAAACGCCCAGATATTGTAGT |
| | | GGCGGTTTCTGCTATGGTGAATTTGACAACTGGGGCCAGGGAACCCTGGTC |
| | | ACCGTCTCCTCAGCCTCC |
| C5 | 619 | CTCGAGCAGTCTGGGGCTGAGGTGAAGAAGCCTGGGTCCTCGGTGAGGGTC |
| | | TCCTGCAGGGCTCCTGGAGGCACCCTCAACAGCTATAGTATAAACTGGGTC |
| | | CGACAGGCCCCTGGACACGGCCTTGAGTGGGTGGGGACGCTCATCCCTATG |
| | | TTTGGTACCTCAAACTACGCGCAGAAGTTCCAGGGGAGAGTCACCATTACC |
| | | GCGGACGGGTCCTCGGGCACCGCCTACATGGAGCTGAACAGCCTGAGATCT |
| | | GACGACACGGCCGTATACTACTGTGTGCGACCTGAAACGCCCAGATATTGT |
| | | AGTGGCGGTTTCTGCTATGGTGAATTTGACAACTGGGGCCAGGGAACCCTG |
| | | GTCACCGTCTCCTCAGCCTCC |
| C6 | 620 | CTCGAGCAGTCTGGGGCTGAGGTGAAGAAGCCTGGGTCCTCGGTGAGGGTC |
| | | TCCTGCAGGCCTCCGGGAGGCACCTTCAACAGTTATAGTATAAACTGGGTC |
| | | CGACAGGCCCCTGGACACGGCCTTGAGTGGGTGGGGACGATCATCCCTATG |
| | | TTTGGAACCTCAAAATACGCGCAGAAGTTGCAGGGGAGAGTCACGATTACC |
| | | GCGGACGGGTCCTCGGGCACCGCTTACATGGAGCTGAACAGCCTGAGATCT |
| | | GACGACACGGCCGTATACTACTGTGTGCGACCTGAAACGCCCAGATATTGT |
| | | AGTGGCGGTTTCTGCTATGGTGAATTTGACAATTGGGGCCAGGGAACCCTG |
| | | GTCACCGTCTCCTCAGCCTCC |
| D1 | 621 | CTCGAGTCTGGGGGAGGCTTGGTCCAGCCGGGGGGGTCCCTGAGACTCTCC |
| | | TGTGAAGCCTCTGGATATTATTTCAGTAGCTTTGCCATGAGTTGGGTCCGC |
| | | CAGACTCCAGGGAAGGGACTGGAGTGGGTCTCCAGTATTGCTGGTGGTACT |
| | | CTTGGAAGAACATCCTATAGAGACTCCGTGAAGGGCCGCTTCACCATCTCC |
| | | AGAGACAACTCCAAGAATACGGTGTTTCTCCACATGAACAACCTGAGACCC |
| | | GAGGACACGGCCGTCTATTATTGTGCGAAAGATCCACTTCTCTTCGCAGGA |
| | | GGACCTAATTGGTTCGACCACTGGGGCCAGGGAACCCTGGTCACCGTCTCC |
| | | TCAGCCTCC |
| D2 | 622 | CTCGAGCAGTCTGGGGGAGGCTTGGTCCAGCCGGGGGGGTCCCTGAGACTC |
| | | TCCTGTGAAGCCTCTGGATATTATTTCAGTAGCTTTGCCATGAGTTGGGTC |
| | | CGCCAGACTCCAGGGAAGGGACTGGAGTGGGTCTCCAGTATTGCTGGTGGT |
| | | ACTCTTGGAAGAACATCCTATAGAGACTCCGTGAAGGGCCGCTTCACCATC |
| | | TCCAGAGACAACTCCAAGAATACGGTGTTTCTCCACATGAACAACCTGAGA |
| | | CCCGAGGACACGGCCGTCTATTATTGTGCGAAAGATCCACTTCTCTTCGCA |
| | | GGAGGACCTAATTGGTTCGACCACTGGGGCCAGGGAACCCTGGTCACCGTC |
| | | TCCTCAGCCTCC |
| D3 | 623 | CTCGAGTCTGGGGGAGGCTTGGTCCAGCCGGGGGGGTCCCTGAGACTCTCC |
| | | TGTGAAGCCTCTGGATATTATTTCAGTAGCTTTGCCATGAGTTGGGTCCGC |
| | | CAGACTCCAGGGAAGGGACTGGAGTGGGTCTCCAGTATTGCTGGTGGTACT |
| | | CTTGGAAGAACATCCTATAGAGACTCCGTGAAGGGCCGCTTCACCATCTCC |
| | | AGAGACAACTCCAAGAATACAATGTTTCTCCACATGAACAACCTGAGACCC |
| | | GAGGACACGGCCGTCTATTATTGTGCGAAAGATCCACTTCTCTTCGCAGGA |
| | | GGACCTAATTGGTTCGACCACTGGGGCCAGGGAACCCTGGTCACCGTCTCC |
| | | TCAGCCTCC |
| D4 | 624 | CTCGAGTCTGGGGGAGGCTTGGTCCAGCCGGGGGGGTCCCTGAGACTCTCC |
| | | TGTGAAGCCTCTGGATATTATTTCAGTAGCTTTGCCATGAGTTGGGTCCGC |
| | | CAGACTCCAGGGAAGGGACTGGAGTGGGTCTCCAGTATTGCTGGTGGTACT |
| | | CTTGGAAGAACATCCTATAGAGACTCCGTGAAGGGCCGCTTCACCATCTCC |
| | | AGAGACAACTCCAAGAATACGGTGTTTCTCCACATGAGCAACCTGAGACCC |
| | | GAGGACACGGCCGTCTATTATTGTGCGAAAGATCCACTTCTCTTCGCAGGA |
| | | GGACCTAATTGGTTCGACCACTGGGGCCAGGGAACCCTGGTCACCGTCTCC |
| | | TCAGCCTCC |
| E | 625 | CTCGAGCAGTCTGGGGCTGAGCTGAAGAAGCCTGGGTCTTCGGTGAAGGTC |
| | | TCCTGCAAGCCCTCTGATGGCACCTTCAGGGCCTATACTCTCAGCTGGGTG |
| | | CGACAGGCCCCTGGACAAACGCTTGAGTGGATGGGCAGGATCATGCCTACT |
| | | GTTGGCATAACAAACTACGCACAGAAATTCCAGGGCAGAGTCACCATTTCC |
| | | GCGGACATGTCCACGGCCACAGCCTACATGGAACTGAGCAGCCTGCGATCT |
| | | GACGACACGGCCATATATTACTGTGCGAAAGGCCCGTACGTTGGCCTTGGG |
| | | GAAGGGTTCTCGGAGTGGGGCCAGGGAACTCTGGTCACCGTCTCCTCAGCC |
| | | TCC |
| F | 626 | CTCGAGCAGTCAGGAAATGAGGTGAAGAAGCCAGGGGCCTCAGTGAAAGTC |
| | | TCCTGCCGGGCTTATGGCTACAATTTTGGCAGCGAACGTCTCAGCTGGGTG |
| | | CGACAGGCCCCTGGACAAGGCCTTGAGTGGATGGGATGGATCAGCGCTTAC |
| | | AATGGTGGCATAAACTATTCACAGAAGTTCCAGGGCAGATTCACCATGACC |
| | | ACAGACACGTCCACGCGCACAGGCTACATGGAATTGAGGAACCTCAGATCT |
| | | GACGACACGGCCGTCTATTACTGTGCGAGAGGGGGGGGGACTGAGTGGGGC |
| | | CAGGGAACCCTGGTCATCGTCTCCTCAGATGAGTCCTCCTCAGCCTCC |
| G | 627 | CTCGAGCAGTCAGGAGCTGAGATGAAGAAGCCTGGGGCCTCATTGAAGGTC |
| | | TCCTGCAAGACTTCTGGTTACACGTTTGACGACTATGGTGTCACCTGGGTG |
| | | CGACAGGCCCCTGGACAAGGACTTGAGTGGATGGGCTGGATCAGCGCTTAC |
| | | AGTGGTAACACATTCTATGCACGGAAGTTCCAGGGCAGAGTCACCATGACC |
| | | ACAGACCCATCCACGCGCACTGCCTACATGGAGCTGAGGAGCCTGAGATCT |
| | | GACGACACGGCCGTGTATTTCTGTGCGAGAGATCCTGGTCTTGCGATTAAT |
| | | GGAGTGGTTTTCCCCTACTTCGGTTTGGACGTCTGGGGCCAAGGGACCACG |
| | | GTCACCGTCTCATCAGCCTCC |
| H1, H1* | 628 | CTCGAGCAGTCTGGGGCTGAGGTGAAGAAGCCTGGCTCCTCGGTGAAAGTC |
| & H1** | | TCCTGCGAGGCTTCTGGAGGCACCTTCGACAACTATTCTCTCAATTGGGTG |
| | | CGACAGGCCCCTGGACAAGGACTTGAGTGGATAGGAGGGGTCGTCCCTTTG |
| | | TTCGGTACAACAAAATACGCACAGAAGTTCCAGGGCAGAGTCACGATAAGC |
| | | GACGACAAATCGACGGGCACAGGACACATGGAGTTGAGAAGCCTGAGATCG |
| | | GAAGACACGGCCGTCTATTATTGTGTGAGATCAGTCACGCCCAGACATTGT |
| | | GGTGGTGGGTTTTGCTACGGTGAATTTGACTACTGGGGCCAGGGAACCCTG |
| | | GTCACCGTCTCCTCAGCCTCC |
| H2 | 629 | CTCGAGCAGTCTGGGGCTGAGGTGAAGAAGCCTGGCTCCTCGGTGAAAGTC |
| | | TCCTGCGAGACTTCTGGAGGGACTTTCGACAACTATGCTCTCAATTGGGTG |
| | | CGACAGGCCCCTGGACAAGGACTTGAGTGGATAGGAGGGGTCGTCCCTTTG |
| | | TTCGGTACAACAAAATACGCACAGAAGTTCCAGGGCAGAGTCACGATAAGC |
| | | GACGACAAATCGACGGGCACAGGACACATGGAGTTGAGAAGCCTGAGATCG |
| | | GAAGACACGGCCGTCTATTATTGTGTGAGATCAGTCACGCCCAGACATTGT |
| | | GGTGGTGGGTTTTGCTACGGTGAATTTGACTACTGGGGCCAGGGAACCCTG |
| | | GTCACCGTCTCCTCAGCCTCC |
| H3 | 630 | CTCGAGCAGTCTGGGGCTGAGGTGAAGAAGCCTGGCTCCTCGGTGAAAGTC |
| | | TCCTGCGAGACTTCTGGAGGGACCTTGGACAACTATGCTCTCAATTGGGTG |
| | | CGACAGGCCCCTGGACAAGGACTTGAGTGGATCGGAGGGGTCGTCCCTTTG |
| | | TTTGGTACAACAAGAAACGCACAGAAGTTCCAGGGCAGAGTCACGATAAGC |
| | | GACGACAAATCGACGGGCACAGGACACATGGAGTTGAGAAGCCTGCGATCG |
| | | GAAGACACGGCCGTTTATTATTGTGTGAGATCAGTCACGCCCAGATATTGT |
| | | GGTGGTGGGTTTTGCTACGGTGAATTTGACTACTGGGGCCAGGGAACCCTG |
| | | GTCACCGTCTCCTCAGCCTCC |
| I | 631 | CTCGAGTCTGGGGGAGGCTTGGTACAGCCAGGGCGGTCCCTGAGACTCTCC |
| | | TGCAAAGCGTCTGGCTTCAATTTTGCTCAGTATACTATGAACTGGGTCCGC |
| | | CAGGCTCCAGGGAAGGGACTGGAGTGGATCGGGCTCATTAGAACCACAGCT |
| | | TATGATGCGGCTACACATTATGCTGCGTCTGTGGAGGGCAGATTCACCATT |
| | | TCCAGAGATGATTCCAAAAGTACCGCCTATCTGCAGATAAACGGCCTGAAA |
| | | ACCGAGGACACAGCCGTCTATTACTGTGCTAGACCCCATGGACCCGGGTTA |
| | | AGTCTTGGCATTTACAGCGCTGAATACTTCGATGAGTGGGGCCAGGGCACC |
| | | CTGGTCACCGTCTCCTCAGCCTCC |
| J1 | 632 | CTCGAGCAGTCTGGGCCTGAGGTGAAGAAGCCTGGGTCCTCGGTGAAGGTC |
| | | TCCTGCAAGGGTTCTGGAGACAGGTTCAACGATCCTGTCACCTGGGTGCGA |
| | | CAGGCCCCTGGACAAGGCCTTGAGTGGATCGGAGGAATCATCCCTGCGTTT |
| | | GGTGCAACAAAGTATGCACAGAAGTTCCAGGGCAGAGTCGTCATTTCCGCG |
| | | GACGCATCCACGGACACGGCCTACATGGAACTGAGCAGCCTGAGATCTGAA |
| | | GACACGGCCGTCTATTATTGTGCGAAAGTAGGCGTGCGGGGCATTATTTTG |
| | | GTTGGGGGCCTGGCGATGAACTGGCTCGACCCCTGGGGCCAGGGAACCCTA |
| | | GTCACCGTCTCCGCAGCCTCC |
| J2 | 633 | CTCGAGCAGTCTGGGCCTGAGGTGAAGAAGCCTGGGTCGTCGGTGAAGGTC |
| | | TCCTGCAAGGATTCTGGAGACACCTTCAACGAACCTGTCACCTGGGTGCGA |
| | | CAGGCCCCTGGACAAGGCCTTGAGTGGATCGGAGGAATCATCCCTGCGTTT |
| | | GGTGTGACAAAGTACGCACAGAAATTCCAGGGCCGAGTCATCATTTCCGCG |
| | | GACGCATCTACGGCCACGGCCTATTTGGAGCTGAGCAGTCTGAGATCTGAA |
| | | GACACGGCCGTCTATTACTGTGCGAAAGTTGGCCTGCGGGGCATTGTAATG |
| | | GTTGGGGGCCTGGCGATGAACTGGCTCGACCCCTGGGGCCAGGGAACCCAA |
| | | GTCACCGTCTCCTCAGCCTCC |
| J3 & | 634 | CTCGAGCAGTCTGGGCCTGAGGTGAAGAAGCCTGGGTCCTCGGTGAAAGTC |
| J3* | | TCCTGCAAGGGTTCTGGAGACACCTTCAACGATCCTGTCACCTGGGTGCGA |
| | | CAGGCCCCTGGACAAGGCCTTGAGTGGATCGGAGGAATCATCCCTCTGTTT |
| | | GGTGCAGCAAAATACGCACAGAAGTTCCAGGGCAGAGTCACGATTTCCGCG |
| | | GACGCATCAGCGTTAACGACCTACATGGAGATGAGCAGCCTGAGACCGGAA |
| | | GACACGGCCGTCTATTATTGTGCGAAAGTGGGTCTGCGGGGCATTACTTTG |
| | | GTTGGGGGCCTGGCGATGAACTGGCTCGACCCCTGGGGCCAGGGAACCCTA |
| | | ATCACGGTCTCCTCAGCCTCC |
| J4 | 635 | CTCGAGCAGTCTGGGGCTGAGGTGAAGAAGCCTGGGTCCTCGGTGAGAGTC |
| | | TCCTGCGAGGTTTCTGGAGACACCTTCAGGGAGCCTGTCAGTTGGGTGCGA |
| | | CAGGCCCCTGGACAAGGATTTGAGTGGATCGGAGGAATCATCCCTATGTTT |
| | | GGCGCAACACATTACGCACAGAAGTTACAGGGCAGAATCACTATTTCTGCG |
| | | GACCAATCGACGAACACAGTCTACATGGAACTGAGGAGCCTGAGATCTGAC |
| | | GACACGGCAGTTTATTATTGTGCGAAAGTTGGACTGCGGGGCATTAATATG |
| | | GTTGGGGGCCTGGCGATGAACTGGTTCGACCCCTGGGGCCAGGGAACCCTA |
| | | GTCACCGTCTCCTCAGCCTCC |
| K | 636 | CTCGAGCAGTCAGGTCCAGGACTGGTGAAGCCTGGCAGACCCTTTTCACTC |
| | | ACCTGTGCCATCTCCGGGGACAGTGTCTCTAGCGACAGTGCTGCTTGGAAC |
| | | TGGGTCAGGCAGTCCCCGTCGAGAGGCCTTGAGTGGCTGGGAAGGACATTC |
| | | TACAGGTCCAAGTGGTATTATGATTATACAGTATCTGTGAAAAGTCGAATC |
| | | ACCATCAACTCAGACACATCCAAGAACCAGTTTTCCCTGCACCTCAACTCT |
| | | GTGACTCCCGAGGACACGGCTGTGTATTATTGTGTAAGAGATTTTTATATT |
| | | GGCCCAACCAGAGACGTCTACTACGGTATGGACGTCTGGGGCCAAGGGACC |
| | | ACGGTCACCGTCTCCTCAGCCTCC |
| L1 | 637 | CTCGAGCAGTCTGGGGCTGAGGTGAAGAAGCCTGGGTCGTCGGTGAAGGTC |
| | | TCCTGCAAGGCTTCTGGAGACACCTTCAGAAGTTATGTCATCACATGGGCG |
| | | CGACAGGCCCCTGGACAAGGGCTTGAGTGGATGGGAGCGATCATCCCTTTC |
| | | TTTGGAACAACAAACCTCGCACAGAAATTCCAGGGCAGAGTCACGATTACC |
| | | GCGGACGAATCAACGCAGACAGTCTACATGGACTTGAGCAGCCTGAGATCT |
| | | GACGACACGGCCGTTTATTATTGTGCGAAAGCCGGAGATCTTTCAGTTGGG |
| | | GGAGTTCTCGCCGGCGGGGTTCCGCACTTGCGACATTTTGACCCCTGGGGC |
| | | CAGGGAACCCTGGTCACCGTCTCCTCGGCCTCC |
| L2 | 638 | CTCGAGCAGTCTGGGGCTGAGGTGAAGATGCCCGGGTCGTCGGTGAAGGTC |
| | | TCCTGCAAGGCTTCTGGAGACACGTTCAGAAGTTCTGTTATCACATGGGCG |
| | | CGACAGGCCCCTGGACAGGGGCTTGAGTGGATGGGAGCGATCATCCCTTTC |
| | | TTTGGAACAACAAACCTCGCACAGAAGTTCCAGGGCAGAGTCACGATTACC |
| | | GCGGACGAATCAACGAAGACAGTCTACATGGACTTGAGCAGCCTGAGATCT |
| | | GATGACACGGCCGTTTATTATTGCGCGAAAGCCGGAGATCTTTCAGTTGGG |
| | | GGAGTTCTCGCCGGCGGGGTTCCGCACTTGCGACATTTCGACCCCTGGGGC |
| | | CAGGGAACCCTGGTCACCGTCTCCTCGGCCTCC |
| L3 | 639 | CTCGAGCAGTCTGGGGCTGAGGTGAAGAAGCCTGGGTCGTCGGTGAAGGTC |
| | | TCCTGCAAGGCTTCTGGAGACACCTTCAGAAGTTATGTTATCACATGGGCG |
| | | CGACAGGCCCCTGGACAAGGGCTTGAGTGGATGGGAGCGATCATCCCTTTC |
| | | TTTGGAACAACAAACCTCGCACAGAAGTTCCAGGGCAGAGTCACGATTACC |
| | | GCGGACGAATCAACGAAGACAGTCTACATGGACTTGAGCAGCCTGACATCT |
| | | GATGACACGGCCGTTTATTATTGTGCGAAAGCCGGAGATCTTTCAGTTGGG |
| | | GGAGTTCTCGCCGGCGGGGTTCCGCACTTGCGACATTTCGACCCCTGGGGC |
| | | CAGGGAACCCTGGTCACCGTCTCCTCGGCCTCC |
| L4 | 640 | CTCGAGCAGTCTGGGGCTGAGGTGAAGAAGCCTGGGTCGTCGGTGAAGGTC |
| | | TCCTGCAAGGCTTCTGGAGACACCTTCAGAAGTTATGTTATCACATGGGCG |
| | | CGACAGGCCCCTGGACAAGGGCTTGAGTGGATGGGAGCGATCATCCCTTTC |
| | | TTTGGAACAACAAACCTCGCACAGAAGTTCCAGGGCAGAGTCACGATTACC |
| | | GCGGACGAATCAACGAAGACAGTCTACATGGACTTGAGCAGCCTGAGATCT |
| | | GATGACACGGCCGTTTATTATTGTGCGAAAGCCGGAGATCTTTCAGTTGGG |
| | | GGAGTTCTCGCCGGCGGGGTTCCGCACTTGCGACATTTCGACCCCTGGGGC |
| | | CAGGGAACCCTGGTCACCGTCTCCTCGGCCTCC |
| M | 641 | CTGGAGCAGTCAGGAGCTGAGGTGAAGAAGCCTGGGGCCTCAGTGAAGGTC |
| | | TCCTGCAAGGCCTCTGGTTACACTTTTACTAACTATGCAATTACCTGGGTG |
| | | CGACAGGCCCCTGGACAAGGTCTTGAGTGGATGGGATGGATCAGCGGTGAC |
| | | AGCACTAACACATACTATGGTCAGAAGTTCCAGGGAAGAGTCACCATGACG |
| | | ACAGACACATCCACGAGCACAGCCTACATGGAGTTGACGAGCCTGACATCT |
| | | GAGGACACGGCCGTGTATTACTGTGCGAGAGAATCGCTCTATATGATTGCG |
| | | TTTGGGAGAGTTATATGGCCACCACTTGACTACTGGGGCCAGGGAACTCTG |
| | | GTCACCATCTCCTCTGCCTCC |
| N1 | 1024 | GAGGTGCAGCTGCTCGAGCAGTCTGGGCCAGAGGTGAAAAAGCCCGGGGAT |
| | | TCTCTGAGGATCTCCTGTAAGATGTCTGGAGACAGTTTAGTCACCACTTGG |
| | | ATCGGCTGGGTGCGCCAGAAGCCCGGGCAAGGCCTGGAGTGGATGGGGATC |
| | | ATCAATCCTGGTGACTCTTCTACCAACATCTATCCTGGTGACTCTGCCACG |
| | | CGATATGGCCCGTCCTTCCAAGGCCAGGTCACCATCTCAATCGACAAGTCA |
| | | ACCAGCACCGCCTACCTGCAGTGGAACGCTGTGAAGCCCTCGGACACCGGC |
| | | ATTTATTACTGTGCGAGACATGTCCCCGTACCAATCTCCGGGACTTTTCTT |
| | | TGGAGAGAGCGGGAAATGCATGATTTCGGCTACTTTGACGACTGGGGCCAG |
| | | GGAACCCTGGTCATCGTCTCCTCA |
| N2 | 1025 | GAGGTGCAGCTGCTCGAGCAGTCTGGGCCAGAGGTGAAAAAGCCCGGGGAT |
| | | TCTCTGAGGATCTCCTGTAAGATGTCTGGAGACAGTTTAGTCACCACTTGG |
| | | ATCGGCTGGGTGCGCCAGAAGCCCGGGCAAGGCCTGGAGTGGATGGGGATC |
| | | ATCAATCCTGGTGACTCTTCTACCAACATCTATCCTGGTGACTCTGCCACG |
| | | CGATATGGCCCGTCCTTCCAAGGCCAGGTCACCATCTCAATCGACAAGTCA |
| | | ACCAGCACCGCCTACCTGCAGTGGAACACTGTGAAGCCCTCGGACACCGGC |
| | | ATTTATTACTGTGCGAGACATGTCCCCGTACCAATCTCCGGGACTTTTCTT |
| | | TGGAGAGAGCGGGAAATGCATGATTTCGGCTACTTTGACGACTGGGGCCAG |
| | | GGAACCCTGGTCATCGTCTCCTCA |
| N3 | 1026 | GAGGTGCAGCTGCTCGAGCAGTCTGGGGCAGAGGTGAAGAAGCCCGGGGAT |
| | | TCTCTGAGGATCTCCTGTAAGATGTCTGGAGACAGTTTAGTCTGGATCGGC |
| | | TGGGTGCGCCAGAAGCCCGGGCAAGGCCTGGAGTGGATGGGGATCATCAAT |
| | | CCTGGTGACTCTGCTACCAACATCTATCCTGGCGACTCTGACACCCGATAT |
| | | GGCCCGTCCTTCCAAGGCCAGGTCACCATCTCAATCGACAAGTCCACCAGC |
| | | ACCGCCTACCTGCAGTGGAACGCTGTGAAGGCCTCGGACACCGGCATTTAT |
| | | TACTGTGCGAGACATGTCCCCGTACCAATCTCCGGGACTTTTCTTTGGAGA |
| | | GAGAGGGAAATGCATGATTTGGGCTACTTTGACGACTGGGGCCAGGGAACC |
| | | CTGGTCATCGTCTCCTCA |
| N4 | 1027 | GAGGTGCAGCTGCTCGAGCAGTCTGGGCCAGAGGTGAAAAAGCCCGGGGAT |
| | | TCTCTGAGGATCTCCTGTAAGATGTCTGGAGACAGTTTAGTCACCACTTGG |
| | | ATCGGCTGGGTGCGCCAGAAGCCCGGGCAAGGCCTGGAGTGGATGGGGATC |
| | | ATCAATCCTGGTGACTCTTCTACCAACATCTATCCTGGTGACTCTGCCACG |
| | | CGATATGGCCCGTCCTTCCAAGGCCAGGTCACCATCTCAATCGACAAGTCC |
| | | ACCAGCACCGCGTACCTGCAGTGGAACAATGTGAAGGCCTCGGACACCGGC |
| | | ATTTATTACTGTGCGAGACATGTCCCCGTACCAATCTCCGGGACTTTTCTT |
| | | TGGAGAGAGCGGGAAATGCATGATTTCGGCTACTTTGACGACTGGGGCCAG |
| | | GGAACCCTGGTCATCGTCTCCTCA |
| O1 | 1028 | GAGGTGCAGCTGCTCGAGCAGTCTGGGGCGGAGGTGAAAAAGGCCGGGGAG |
| | | TCTGTCAGACTCTCCTGTAAGGCTTCGGGATACAGGTTTGGCGACTACTGG |
| | | ATCGCCTGGGTGCGCCAGTTGCCCGGAAGAGCCCCGGAATGGATGGGGATC |
| | | ATCTATCCTGATGACTCTGATACCAAGTACAGCCCGTCCTTCCAAGGCCAG |
| | | GTCACCATCTCAGCCGACAAGTCCATCAGAACCACCTTCTTGGACTGGGGC |
| | | AGCCTGAAGGCCTCGGACACCGCCATCTATTACTGTGCGAGAGGCTGCCTT |
| | | GGTGCCAAGTGCTACTATCCTCACTACTATTACGGTTTGGACGTCTGGGGC |
| | | CAAGGGACCACGGTCATCGTCTCCTCA |
| P1 | 1029 | GAGGTGCAGCTGCTCGAGTCGGGGGGAGGCGTGGTCCAGCCTGGGGGGTCC |
| | | CTGAGACTCTCCTGTGCAGCCTCTGGATTCACATTCACTAGCTTTACTATG |
| | | CACTGGGTCCGCCAGGCTCCAGGCAAGGGGCTGGAGTGGGTGGCACTTATA |
| | | TCACATGATGGAAGCAATAAAGACTACGCGGACTCCGTGAGGGGCCGATTC |
| | | ACCGTCTCCAGAGACAATTCCAAGAAAATGGTTTATTTGCAGATGAGCAGC |
| | | CTGAGACCTGACGACGCGGCTGTCTATTACTGTGCGAGAGGGGGGCCCGCC |
| | | TATTATACTTATTCCGATACTTTGACTGGTTATCATAACGTCGTGGGGGAC |
| | | TACTGGGGCCAGGGAACCCTGGTCACCGTCTCCTCA |
| P1a | 1030 | GAGGTGCAGCTGCTCGAGTCGGGGGGAGGCGTGGTCCAGCCTGGGGGGTCC |
| | | CTGAGACTCTCCTGTGCAGCCTCTGGATTCACATTCACTAGCTTTACTATG |
| | | CACTGGGTCCGCCAGGCTCCAGGCAAGGGGCTGGAGTGGGTGGCACTTATA |
| | | TCACATGATGGAAGCAATAAAGACTACGCGGACTCCGTGAGGGGCCGATTC |
| | | ACCGTCTCCAGAGACAATTCCAAGAAAATGGTTTATTTGCAGATGAGCAGC |
| | | CTGAGACCTGACGACGCGGCTGTCTATTACTGTGCGAGAGGGGGGCCCGCC |
| | | TATTATACTTATTCCGATACTTTGACTGGTTATCATAACGTCGTGGGGGAC |
| | | TACTGGGGCCAGGGAACCCTGGTCACCGTCTCCTCA |
| P2 | 1031 | GAGGTGCAGCTGCTCGAGTCAGGGGGAGGCGTGGTCCAGCCTGGGAGGTCC |
| | | CTGAGACTCTCCTGTGCAGCCTCTGGATTCACTCTTGATACGTTTACTATG |
| | | CACTGGGTCCGCCAGTCTCCAGGCAAGGGGCTGGAGTGGGTGGCCCTTATC |
| | | TCACATGATGCCAACAATAAAGACTACGCGGACTCCGTGAAGGGCCGATTC |
| | | ACCATCTCCAGAGACAATTCCAAGAAATTGGTGTATTTGCAGATGGACAGC |
| | | CTGAGATCTGAGGACACGGCTGTCTATTACTGTGCGAGAGGGGGGCCCGCC |
| | | TATTATCTGTATTCCGATGTTTTGACTGGTTTTCATAACGTCGTGGGGGAC |
| | | TATTGGGGCCAGGGAACCCTGGTCACCGTCTCCGCA |
| P3 | 1032 | GAGGTGCAGCTGCTCGAGTCTGGGGGAGGCGTGGTCCAGCCTGGGAAGTCC |
| | | CTGAGACTCTCCTGTGCAGTCTCTGGATTCACGTTGAATACCTTTGCTATG |
| | | CACTGGGTCCGCCAGGTCCCAGGCAAGGGGCTGGAGTGGGTGGCTCTGACC |
| | | TCACATGATGGAAGCCGACAAGACTACGCAGACTCCGTGAGGGGCCGATTC |
| | | ACCATCTCCAGAGACAACTCCAAGAGTATGGTGTTTCTGCTGATGAACAGC |
| | | CTGAGAGCCGAGGACACGGCTGTGTATTATTGTGTGAGAGGGGGGCCCGCA |
| | | TATTATACGTACAACGATGTTTTGACTGGTTACGCTTATGTCGTGGGGGAC |
| | | TTCTGGGGCCAGGGAACCCTGGTAACCGTCTCCTCA |
| P4 | 1033 | GAGGTGCAGCTGCTCGAGTCTGGGGGAGGCGTGGTCCAGCCTGGGAAGTCC |
| | | CTGACAGTCTCCTGTGCAGCCTCTGGATTCACCTTCAGTACCTTTACCATG |
| | | CACTGGGTCCGCCAGGCTCCAGGCAAGTGGCTGGAGTGGGTGGCAGTCATC |
| | | TCACATGATGGCGGCACTGAACACTACGCAGACTCCGTGACGGGCCGATTC |
| | | ACCATCTCCCGAGACAATTCCAAGAACACGCTGCATCTGCAAATGAACAGC |
| | | CTGAGACCTGAGGACACGGCAGTGTACTTTTGTGCGAGAGGGGGGCCCGCG |
| | | TATTATTTGTATAACGATGTTCTGACTGGTTATTATAACGTCGTGGGGGAC |
| | | TTTTGGGGCCAGGGAACCCTGGTCACCGTCTCCTCA |
| P5 | 1034 | GAGGTGCAGCTGCTCGAGTCTGGGGGAGGCGTGGTCCAGCCTGGGAAGTCC |
| | | CTGACAGTCTCCTGTGCAGCCTCTGGATTCACCTTCAGTACCTTTACCATG |
| | | CACTGGGTCCGCCAGGCTCCAGGCAAGGGGCTGGAGTGGGTGGCAGTCATC |
| | | TCACATGATGGCGGCACTGAACACTACGCAGACTCCGTGACGGGCCGATTC |
| | | ACCATCTCCCGAGACAATTCCAAGAACACGCTGCATCTGCAAATGAACAGC |
| | | CTGAGACCTGAGGACACGGCAGTGTACTTTTGTGCGAGAGGGGGGCCCGCG |
| | | TATTATTTGTATAACGATGTCCTGACTGGTTATTATAACGTCGTGGGGGAC |
| | | TTCTGGGGCCAGGGAACCCTGGTCACCGTCTCCTCG |
| P6 | 1035 | GAGGTGCAGCTGCTCGAGTCTGGGGGAGGCGTGGTCCAGCCTGGGAAGTCC |
| | | CTGACAGTCTCCTGTGCAGCCTCTGGATTCACCTTCAGTACCTTTACCATG |
| | | CACTGGGTCCGCCAGGCTCCAGGCAAGTGGTTGGAGTGGGTGGCAGTCATC |
| | | TCACATGATGGCGGCACTGAACACTACGCAGACTCCGTGACGGGCCGATTC |
| | | ACCATCTCCCGAGACAATTCCAAGAACACGCTGCATATGCAAATGAACAGC |
| | | CTGAGACTTGAGGACACGGCAGTGTACTTTTGTGCGAGAGGGGGGCCCGCG |
| | | TATTATTTGTATAACGATGTTCTGACTGGTTATTATAACGTCGTGGGGGAC |
| | | TTTTGGGGCCAGGGAACCCTGGTCACCGTCTCCTCA |
| Q1 | 1036 | GAGGTGCAGCTGCTCGAGCAGTCTGGGGCTGAGGTGAGGAAGCCTGGGGCC |
| | | TCCGTGAAGGTCTCCTGCAAGGCTTCTGGTTACACCTTTACCAACAATGGT |
| | | CTCAACTGGGTGCGACAGGCCCCTGGACAAGGGCTTGAGTGGATGGGGTGG |
| | | ATCAGCCCTTACAATGGAGACACAGACTTTGCACATAAGTTCCAGGGCCGA |
| | | ATCAGCATGACCACAGACACATCCACGAATACAGCCTACATGGAGTTGAGG |
| | | AGTCTGAGATCGGACGACACGGCCGTGTATTACTGTGCGAGAGATCGGAAT |
| | | TCAGCAGGTGGTACCTGGCTTTTTCGCGACCCTCCACCTGGCTCGACGTTT |
| | | TTTGATTCCTGGGGCCAGGGATCCCTGGTCACCGTCTCCTCA |
| Q2 | 1037 | GAGGTGCAGCTGCTCGAGCAGTCAGGAGCTGAGGTGAAGAAGCCTGGGGCC |
| | | TCCGTGAAGGTCTCCTGCAAGGCTTCTGGTTACACCTTTACCAACAATGGT |
| | | CTCAACTGGGTGCGACAGGCCCCTGGACAAGGGCTTGAGTGGATGGGGTGG |
| | | ATCAGCCCTTACAATGGGGACACAGACTTTGCACATAAGTTCCAGGGCCGA |
| | | ATCAGCATGACCACAGACACATCCACGAATACAGCCTACATGGAGTTGAGG |
| | | AGTCTGAGATCAGACGACACGGCCGTGTATTACTGTGCGAGAGATCGGAAT |
| | | TCAGCAGGTGGTACCTGGCTTTTTCGCGACCCTCCACCTGGCTCGACGTTT |
| | | TTTGATTCCTGGGGCCAGGGATCCCTGGTCACCGTCTCCTCA |
| R1 | 1038 | GAGGTGCAGCTGCTCGAGCAGTCTGGGGCTGAGGTGAAGAAGCCTGGGGCC |
| | | TCAGTGAAGGTCTCCTGCAAGGCTTCTGGTTACACCTTTAGCATCTATGGT |
| | | GTTGCCTGGGTGCGACAGGCCCCTGGACAGGGACTTGAGTGGATGGGATGG |
| | | ATCAGCCCCCAGAATGGTGACACACACTCTCCACAGAAGTTCCAGGGCAGA |
| | | CTCACAATGACCACAGACACCTCCACGAGCACAGCCTACATGGAGCTGAGG |
| | | AGCCTGAGATCTGACGACACGGCCGTATATTTTTGTGCGAGAGACTATGGA |
| | | GTGAACTTCGGGGGAGGGTCCGAACACAACCTAGACTACTGGGGCCGGGGA |
| | | ACCCGGGTCACCGTCTCCTCA |
| S1 | 1039 | GAGGTGCAGCTGCTCGAGCAGTCTGGGGCTGAGGTTAAGAAGCCTGGGACC |
| | | TCAGTGAAGGTCTCCTGCACGGCTTCTGGTTACATCTTTACCAGTTTTGGT |
| | | ATTAGCTGGGTGCGACAGGCCCCTGGACAAGGACTTGAGTGGATGGGACGG |
| | | ATCGACACTTACAATGGTAAGACGAACTATGCACAGAAGCTCCAGGGCAGA |
| | | GTCACCATGACCACAGACACATACACGAGCACAGCCTACATGGAACTGAGG |
| | | AGCCTGACATCTGACGACACGGCCGTGTATTACTGTGCGAGAGATGATTGT |
| | | AGGAGTTCCACTTGCTATCTGGCTCAACACAACTGGCAGGCATATTACCAT |
| | | GACTCCTGGGGCCAGGGAACCCTGGTCACCGTCTCCTCA |
| T1 | 1040 | GAGGTGCAGCTGCTCGAGTCTGGGGGAGGCTTAGTTCAGCCTGGGGGGTCC |
| | | CTGAGACTCTCCTGTGCAGCCTCTGGATTCACCTTCAGTAGGTTCTGGATG |
| | | CACTGGGTCCGCCAAGCTCCAGGGAAGGGGCTGGTGTGGGTCGCACGTATT |
| | | AATAGTGATGGGAGTAGCACAACCTACGCGGACTCCGTGAAGGGCCGATTC |
| | | ACCATCTCCAGAGACAACGCCAAGAACACGTTGTATCTGCAAATGAACAGT |
| | | CTGAGAGACGAGGACACGGCTGTGTATTTCTGTGCAAGAGGGGGGGACAGC |
| | | TCATCCCCCTACTACTACCCTATGGACGTCTGGGGCCAAGGGACCACGGTC |
| | | GCCGTCTCATCA |
| U1 | 1041 | GAGGTGCAGCTGCTCGAGCAGTCAGGGCCTGAGGTGAAGAGGCCTGGGACC |
| | | TCGGTGAAAATGTCCTGCAAGATTTCGGGAGGCGCCTCCATCACTCAAGCC |
| | | ATGAGTTGGGTCCGACAGGCCCCAGGACAAGGTCTTGAGTGGATGGGGGGC |
| | | ATCACCCCTATCTTTGGAACAGTAAACTACGCACAGAAGATCTTGGGCAGA |
| | | GTCACCATTACCGCGGACGAGGACACAGTCTCCTTAGAGCTGAGCAGTCTG |
| | | AAGTCTGAGGACACGGCCGTCTATTATTGTGCGAGAGAGGTCAATTTGAAA |
| | | ACCTGGAACCTCGCCCATCCCAATGTCTTTGATGTCTGGGGCCAAGGGACA |
| | | ATGCTCACTGTCTCTTCA |
| V1 | 1042 | GAGGTGCAGCTGCTCGAGCAGTCTGGGGCTGAGGTGCAGAAGCCTGGGGCC |
| | | TCAGTGAAAGTCTCCTGCAAGCCGTCTGGTTACATTTTTACCAATTTTGGT |
| | | ATCAGCTGGGTTCGACAGGCCCCTGGACAAGGGCTTGAGTGGATGGCATGG |
| | | ATCAACACTTACAATGGTAAAACAACCTATGCACAGAGTCTCCAGGGCAGA |
| | | GTCACCCTGACCACCGACCCATACACGAACACAGTCTTCATGGAACTGAGG |
| | | AGCCTGAGATCTGACGACACGGCCGTCTATTACTGTGCGAGAGAAAACGAG |
| | | GGTGAATATGTTTGGGGTCATTTTCGTTCCGACTACTGGGGCCAGGGAACC |
| | | CTGGTCACCGTCTCCTCA |

TABLE 6
Nucleic Acids Encoding Fab Light Chains

| | | |
|---|---|---|
| | SEQ ID | |
| Fab | NO | Nucleic Acids Encoding Fab Light Chains |

| | | |
|---|---|---|
| A | 642 | GAGCTCACACAGTCTCCAGCCACCCTGTCTGTGTCTCCTGGGGAAAGC |
| | | GCCACCCTCTCCTGCAGGGCCAGTCAGAGTGTTAGCGACAACTTAGCC |
| | | TGGTACCAGCAGAAACCTGGCCAGGCTCCCAGGCTCCTCATCTATGGT |
| | | GCATCCAGCAGGGCCCCTGCCATCCCAGGCAGGTTCAGTGGCAGTGGG |
| | | TCTGGGACAGACTTCACTCTCACCATCAGCAGACTGGAGCCTGAAGAT |
| | | CTTGCAGTGTATCACTGTCAGCAGTATGGTGCGTCACCTTGGACGTTC |
| | | GGCCAAGGGACCAAGGTGGAAATCAAACGAACTGTGGCTGCACCATCT |
| | | GTCTTCATCTTCCCGCCATCTGATGAGCAGTTGAAATCTGGAACTGCC |
| | | TCTGTTGTG |
| B1 | 643 | GAGCTCACACTCACGCAGTCTCCAGGCACCCTGTCTTTGTCTCCAGGG |
| | | GAAAGAGCCACCCTCTCCTGTAGGGCCAGTCAGAGTGTTAGCAACAGC |
| | | TACTTAGCCTGGTACCAGCAGAAACCTGGCCAGGCTCCCAGGCTCCTC |
| | | ATCTATGGTGCATCCAGCAGGGCCACTGGCATCCCAGACAGGTTCAGT |
| | | GGCAGTGGGTCTGGGACAGACTTCACTCTCACCATCAGCAGACTGGAG |
| | | CCTGAAGATTTTGCAGTGTATTACTGTCAACAGTATGGTAGCTCACCT |
| | | CAGACGTTCGGCCAAGGGACCAAGGTGGAAATCAAACGAACTGTGGCT |
| | | GCACCATCTGTCTTCATCTTCCCGCCATCTGATGAGCAGTTGAAATCT |
| | | GGAACTGCCTCTGTTGTG |
| B2 | 644 | GAGCTCACCCAGTCTCCAGACTCCCTGGCTGTGTCTCTGGGCGAGAGG |
| | | GCCACCATCAACTGCAAGTCCAGCCAGAGTGTTTTATACAGCTCCAAC |
| | | AATAAGAACTACTTAGCTTGGTACCAGCAGAAACCAGGGCAACCTCCT |
| | | CAGCTGCTCATTTACTGGGCATCTACCCGGGAATCCGGGGTCCCTGAC |
| | | CGATTCAGTGGCAGCGGGTCTGGGACAGATTTCACTCTCACCATCAGC |
| | | AGCCTGCAGGCTGAAGATGTGGCAGTTTATTTCTGTCAGCAATATTAT |
| | | AGTACTCCCTTCACTTTCGGCCCTGGGACCAAAGTGGAAATCAAACGA |
| | | ACTGTGGCTGCACCATCTGTCTTCATCTTCCCGCCATCTGATGAGCAG |
| | | TTGAAATCTGGAACTGCCTCTGTTGTG |
| B3 | 645 | GAGCTCGTGATGACACAGTCTCCAGGCACCCTGTCTTTGTCTCCAGGG |
| | | GAAAGAGCCACCCTCTCCTGCAGGGCCAGTCAGCGTGTTGGCAGCAGC |
| | | TACTTAGCCTGGTACCAGCAGAAACCTGGCCAGGCTCCCAGGCTCCTC |
| | | GTCTATGGTGCATCCAGCAGGGCCACTGGCATCCCAGACAGGTTCAGT |
| | | GGCAGTGGGTCTGGGACAGACTTCACTCTCACCATCAGCAGGCTGCAG |
| | | CCTGAAGATTTTGCAGTATATTACTGTCAGCAGTATGGTACGACGTTC |
| | | GGCCAAGGGACCAGGGTGGACATCAAACGAACTGTGGCTGCACCATCT |
| | | GTCTCCATCTTCCCGCCATCTGATGAGCAGTTGAAATCTGGAACTGCC |
| | | TCTGTTGTG |
| C1 | 646 | GAGCTCACACTCACGCAGTCTCCAGGCACCCTGTCTTTGTCTCCAGGG |
| | | AAAAGAGCCACCCTCTCCTGCAGGGCCAGTCAGAGTGTTAGCGGCAGC |
| | | TACTTAGCCTGGTACCAGCAGAAACCTGGCCAGGCTCCCAGGCTCCTC |
| | | ATCTATGGTGCATCCAACAGGGCCACTGGCATCCCACACAGGTTCAGT |
| | | GGCAGTGGGTCTGGGACAGACTTCACTCTCACCATCAGCAGACTGGAG |
| | | CCTGAGGATTTTGCAGTGTATTACTGTCAGCAGTATGGTTCCTCACCG |
| | | ACGTTCGGCCAGGGGACCAGGGTGGACATCAAACGAACTGTGGCTGCA |
| | | CCATCTGTCTTCATCTTCCCGCCATCTGATGAGCAGTTGAAATCTGGA |
| | | ACTGCCTCTGTTGTG |
| C1* | 647 | GAGCTCACGCAGTCTCCAAGCACCCTGTCTTTGTCTCCAGGGGAAGGA |
| | | GCCACCCTCTCCTGCAGGCCCAGTCAGAGTGTTAGTAGAAACTACCTA |
| | | GCCTGGTATCAGCAGAAACCTGGCCAGGCTCCCAGACTCCTCATCTAT |
| | | GGTGCGTCCACCAGGGCCACCGGCATCCCAGACAGGTTCAGTGGCAGT |
| | | GGGTCTGGGACAAACTTCACTCTCACCATCAGCAGACTGGAGCCTGAA |
| | | GATTTTGCAGTGTATTTCTGTCAGCACTATGGTAACTCACCTCCATAC |
| | | ACTTTTGGCCAGGGGACCAAGCTGGAGATCAAACGAACTGTGGCTGCA |
| | | CCATCTGTCTTCATCTTCCCGCCA |
| C2 | 648 | GAGCTCACGCAGTCTCCAGGCACCCTGTCTTTGTCTCCAGGGGAAAGA |
| | | GCCGCCCTCTCTTGCAGGGCCAGTCAGAGTATTAGCACCAACTACTTA |
| | | GCCTGGTACCAGCAGAAACCAGGCCAGGCTCCCAGGCTCCTCATCTAT |
| | | GGTACGTCCAACAGGGCCACTGGCATCCCAGACAGGTTCAGTGGCACT |
| | | GGGTCTGGGACAGACTTCAGTCTCACCATCAGCAGACTGGAGCCTGAA |
| | | GATTCTGCAGTGTATTACTGTCAGCAGTATGGTACCTCACCATTCACT |
| | | TTCGGCCCTGGGACCAAAGTGGATATCAAACGAACTGTGGCTGCACCA |
| | | TCTGTCTTCATCTTCCCGCCATCT |
| C2* | 649 | GAGCTCACACAGTCTCCAGGCACCCTGTCTTTGTCTCCAGGGGAAAGA |
| | | GCCACCCTCTCCTGCAGGGCCAGTCAGAGTGTTAGCAGCAGCTACTTA |
| | | GCCTGGTACCAGCAGAAACCTGGCCAGGCTCCCAGGCTCCTCATCTAT |
| | | GGTGCATCTAGCAGGGCCACTGGCATCCCAGACAGGTTCAGTGGCAGT |
| | | GGGTCTGGGACAGACTTCACTCTCACCATCAGCAGACTGGAGCCTGAA |
| | | GATTTTGCAGTGTATTACTGCCAACAGTATGGTAGCTCACCTCAGACG |
| | | TTCGGCCAAGGGACCAAGGTGGAAATCAAACGAACTGTGGCTGCACCA |
| | | TCTGTCTTCATCTTCCCGCCATCTGATGAGCAGTTGAAATCTGGAACT |
| | | GCCTCTGTTGTG |
| C3 | 650 | GAGCTCACGCAGTCTCCAGGCACCCTGTCTTTGTCTCCAGGGGAAAGA |
| | | GCCACCCTCTCCTGCAGGGCCAGTCAGAGTGTTAGCAGCAGCTACTTA |
| | | GCCTGGTACCAGCAGAAACCTGGCCAGGCTCCCAGGCTCCTCATCTAT |
| | | GGTGCATCCAGCAGGGCCACTGGCATCCCAGACAGGTTCAGTGGCAGT |
| | | GGGTCTGGGACAGACTTCACTCTCACCATCAGCGGACTGGAGCCTGAA |
| | | GATTTTGCAGTGTATTACTGTCAGCAGTATGGAAGCTCACCTCTCACT |
| | | TTCGGCGGAGGGACCAAGGTGGAGATCAAACGAACTGTGGCTGCACCA |
| | | TCTGTCTTCATCTTCCCGCCATCT |
| C4 | 651 | GAGCTCACGCAGTCTCCAGGCACCCTGTCTTTGTCTCCAGGGGAAAGA |
| | | GCCACCCTCTCCTGCAGGGCCAGTCAGAGTGTTAGCAGCAGCTACTTA |
| | | GCCTGGTACCAGCAGAAACCTGGCCAGGCTCCCAGGCTCCTCATCTAT |
| | | GGTGCATCCAGCAGGGCCACTGGCATCCCAGACAGGTTCAGTGGCAGT |
| | | GGGTCTGGGACAGACTTCACTCTCACCATCAGCAGACTGGAGCCTGAA |
| | | GATTTTGCAGTGTATTACTGTCAGCACTATGGAAGTTCATCGTACACT |
| | | TTCGGCCAGGGGACCAGGGTGGAGATCAAACGAACTGTGGCTGCACCA |
| | | TCTGTCTTCATCTTCCCGCCATCTGATGAGCAGTTGAAATCTGGAACT |
| | | GCCTCTGTTGTG |
| C5 | 652 | GAGCTCACGCAGTCTCCAGGCACCTTGTATGTGTCTCCTGGGGAAAGA |
| | | GCCACCCTCTCCTGCAGGGCCAGTCAGAGTGTTCCCGACAACCACTTA |
| | | GCCTGGTACCAGCAGAAACCTGGCCAGACTCCCAGGCTCCTCATCTAT |
| | | GGTGCATCCAAGAGGGCCACGGGCATCCCAGACAGGTTCAGTGGCAGT |
| | | GGGTCTGGGACAGACTTCACTCTCACCATCAGCAGACTGGAGCCTGAA |
| | | GATTTTGCAGTGTATTACTGTCAGCAGTATGGTAGCTCACCTCAGACG |
| | | TTCGGCCAAGGGACCAAGGTGGAAATCAAACGAACTGTGGCTGCACCA |
| | | TCTGTCTTCATCTTCCCGCCATCTGATGAGCAGTTGAAATCTGGAACT |
| | | GCCTCTGTTGTG |
| C6 | 653 | GAGCTCACACAGTCTCCAGCCACCCTGTCTGTGTCTCCAGGGGAAAGC |
| | | GCCACCCTCTCCTGCAGGGCCAGTCAGAGTGTTAGCAGCAACTTAGCC |
| | | TGGTACCAGCAGAAACCTGGCCAGGCTCCCAGGCTCCTCATCTATGGT |
| | | GCATCGACCAGGGCCACTGGTATCCCAGCCAGGTTCAGTGGCAGTGGG |
| | | TCTGGGACAGACTTCACTCTCACCATCAGCAGACTGGAGCCTGAAGAT |
| | | TTTGCAGTGTATTACTGTCAGCAGTATGGTGGCTCACCTCCGTACACT |
| | | TTTGGCCAGGGGACCAAGCTGGAGATCAAACGAACTGTGGCTGCACCA |
| | | TCTGTCTTCATCTTCCCGCCATCTGATGAGCAGTTGAAATCTGGAACT |
| | | GCCTCTGTTGTG |
| D1 | 654 | GAGCTCACGCAGTCTCCAGGCACCCTGTCTTTGTCTCCAGGGGAAAGA |
| | | GCCACCCTCTCCTGCAGGGCCAGTCAGAGTGTTAGCAGCAGCTACTTA |
| | | GCCTGGTACCAGCAGAAACCTGGCCAGGCTCCCAGGCTCCTCATCTAT |
| | | GGTGCATCCAGCAGGGCCACTGGCATCCCAGACAGGTTCAGTGGCAGT |
| | | GGGTCTGGGACAGACTTCACTCTCACCATCAGCAGACTGGAGCCTGAA |
| | | GATTTTGCAGTGTATTACTGTCAACAGTATGGTAGCTCACCTCAGACG |
| | | TTCGGCCAAGGGACCAAGGTGGAAATCAAACGAACTGTGGCTGCACCA |
| | | TCTGTCTTCATCTTCCCGCCATCTGATGAGCAGTTGAAATCG |
| D2 | 655 | GAGCTCACGCAGTCTCCAGCCACCCTGTCTGTGTCTCCAGGGGAAAGA |
| | | GCCACCCTCTCCTGCAGGGCCAGTCAGACTATTAGCGACAACTTAGCC |
| | | TGGTACCAGCAGAAACCTGGCCAGGCTCCCAGGCTCCTCATCTATGGT |
| | | GCATCCAGCAGGGCCACTGGCATCCCAGACAGGTTCAGTGGCAGTGGG |
| | | TCTGGGACAGACTTCACTCTCACCATCAGCAGACTGGAGCCTGAAGAT |
| | | TTTGCAGTATATTACTGTCAACAGTATGGTAGCTCACCTCAGACGTTC |
| | | GGCCAAGGGACCAAGGTGGAAATCAAACGAACTGTGGCTGCACCATCT |
| | | GTCTTCATCTTCCCGCCATCTGAT |
| D3 | 656 | GAGCTCACACTCACGCAGTCTCCAGGCACCCTGTCTTTGTCTCCAGGG |
| | | GAAAGAGCCACCCTCTCCTGCAGGGCCAGTCAGACTGTTAGCAGCAGC |
| | | TACTTAGCCTGGTACCAGCAGAAACCTGGCCAGGCTCCCAGGCTCCTC |
| | | ATCTATGGTGCATCCAGCAGGGCCACTGGCATCCCAGACAGGTTCAGT |
| | | GGCAGTGGGTCTGGGACAGACTTCACTCTCACCATCAGCAGACTGGAG |
| | | CCTGAAGATTTTGCAGTGTATTACTGTCAACAGTATGGTAGCTCACCT |
| | | CAGACGTTCGGCCAAGGGACCAAGGTGGAAATCAAACGAACTGTGGCT |
| | | GCACCATCTGTCTTCATCTTCCCGCCATCTGATGAGCAGTTGAAATCT |
| | | GGAACTGCT |
| D4 | 657 | GAGCTCGTGATGACACAGTCTCCAGGCACCCTGTCTTTGTCTCCAGGG |
| | | GAAAGAGCCACCCTCTCCTGCAGGGCCAGTCAGAGTGTTAGCAGCAGC |
| | | TACTTAGCCTGGTACCAGCAGAAACCTGGCCAGGCTCCCAGGCTCCTC |
| | | ATCTATGGTGCATCCAGCAGGGCCACTGGCATCCCAGACAGATTCAGT |
| | | GGCAGTGGGTCTGGGACAGACTTCACTCTCACCATCACCAGACTGGAG |
| | | CCTGAAGATTTTGCAGTGTATTACTGTCAACAGTATGGTAGCTCACCT |
| | | CAGACGTTCGGCCAAGGGACCAAGGTGCAAATCAAACGAACTGTGGCT |
| | | GCACCATCTGTCTTCATCTTCCCGCCATCTGATGAGCAGTTGAAATCT |
| | | GGAACTGCT |
| E | 658 | GAGCTCGTGTTGACGCAGTCTCCACTCTCCCTGCCCGTCACCCTTGGA |
| | | CAGCCGGCCTCCATCTCCTGCAGGTCTACTCAGAGCCTCGTTTACAGT |
| | | GATGGAAACACCTACTTGAATTGGTTTCACCAGAGGGCAGGCCAACCT |
| | | CCAAGGCGCCTAATTTATAAGGTCTCTAACCGGGACTCTGGGGTCCCA |
| | | GAGAGATTCAGCGGCAGTGGGTCAGGCACTGATTTCACACTGAAAATC |
| | | AGCAGGGTGGAGGCTGAGGATGTTGGCATTTATTACTGCATGCAAGGA |
| | | GCACACTGGCCTCCCACTTTCGGCGGAGGGACCAAGGTGGAGATCAAT |
| | | CGAACTGTGGCTGCACCATCTGTCTTCATCTTCCCGCCATCTGATGAG |
| | | CAGTTGAAATCTGGAACTGCT |
| F | 659 | GAGCTCCAGATGACCCAGTCTCCATCCTTCCTGTCCGCTTCTGTGGGA |
| | | GACAGAGTCACCATCACTTGCCGGGCCAGTCAGGGCATTAGCAGTTAT |
| | | TTAGCCTGGTATCAGCAAAAACCAGGGAAAGCCCCTAAGCTCCTGATC |
| | | TCTTCTGTATCCACTTTGCAAAGTGGGGTCTCATCAAGGTTCAGCGGC |
| | | AGTGGATCTGGGACAGGATTCACTCTCACAATCAGCAGCCTGCAGTCT |
| | | GAAGATTCTGCAACTTATTACTGTGAACAACTGAATAGTTTCCCGTAC |
| | | ACTTTTGGCCAGGGGACCAAGCTGGAGATCAAACGAACTGTGGCTGCA |
| | | CCATCTGTCTTCATCTTCCCGCCATCT |
| G | 660 | GAGCTCACTCAGTCTCCAGTCTCCCTGCCCGTCACCCCTGGAGAGCCG |
| | | GCCTCCATCTCCTGCAGGTCTAGTCAGAGCCTCCTGCATAGTAATGGA |
| | | AACCACTATTTGGATTGGTACCTGCAGAAGCCAGGGCAGTCTCCACAG |
| | | CTCCTGATGTATTTGGGTTCTAATCGGGCCTCCGGGGTCCCTGACAGG |
| | | TTCAGTGGCAGTGGATCAGGCACAGATTTTACACTGAAAATCAGCAGA |
| | | GTGGAGGCTGAGGATGTTGGGGTTTATTACTGCATGCAAGGTCTACAG |
| | | ACCCCGTGGACGTTCGGCCAAGGGACCAAGGTGGAAATCAAACGAACT |
| | | GTGGCTGCACCATCTGTCTTCATCTTCCCGCCATCTGAT |
| H1 | 661 | GAGCTCACACTCACGCAGTCTCCAGGCACCCTGTCTTTGTCTCCAGGG |
| | | GAAAGAGCCACCCTCTCCTGCAGGGCCAGTCAGAGTATTAGCAGCAGC |
| | | TACTTAGCCTGGTACCAGCAGAAACCTGGCCAGGCTCCCAGGCTCCTC |
| | | ATCTATGGTGCATCCAGAAGGGCCACTGGCATCCCAGACAGGTTCAGT |
| | | GGCAGCGGGTCTGGGACAGACTTCACTCTCACCATCAGCAGACTGGAG |
| | | CCTGAAGATTTTGCAGTGTATTACTGTCAGCAGTATGGTAGCTCACCG |
| | | CTCACTTTCGGCGGAGGGACCAAGGTGGAGATCAAACGAACTGTGGCT |
| | | GCACCATCTGTCTTCATCTTCCCGCCATCTGAT |
| H1* | 662 | GAGCTCACACAGTCTCCAGCCACCCTGTCCGTGTCTCCAGGGGAAAGA |
| | | GCCACCCTCTCCTGCAGGGCCAGTCGGGGTATTAGCAGCAACTTAGCC |
| | | TGGTACCAGCAGAAGCCTGGCCAGGCTCCCAGGCTCCTCATCTATGGT |
| | | GCATCCAGCAGGGCCACTGGCATCCCAGACAGGTTCAGTGGCAGTGGA |
| | | TCTGGGACAGACTTCACTCTCACCATCAGCAGACTGGAGCCTGAAGAT |
| | | TTTGCAGTGTATTACTGTCAACAGTATGGTAGCTCACCTCAGACGTTC |
| | | GGCCAAGGGACCGAGGTGGAAATCAAACGAACTGTGGCTGCACCATCT |
| | | GTCTTCATCTTCCCGCCATCTGATGAGCAG |
| H1** | 663 | GAGCTCACACTCACGCAGTCTCCAGGCACCCTGTCTTTGTCTCCAGGG |
| | | GAGAGAGCCACCCTCTCCTGCAGGGCCAGTCAGAGTGTTAGCAGCGAC |
| | | TCCTTAGCCTGGTACCAGCAGAAACCTGGCCAGGCTCCCAGGCTCCTC |
| | | ATCTATGGTGCCTCTAGCAGGGCCACTGGCATCCCAGACAGGTTCAGT |
| | | GGCAGTGGGTCTGGGACAGACTTCACTCTCACCATCAGCAGACTGGAG |
| | | CCTGAAGATCTTGGAGTGTATTACTGTCAGCAGTATGGTCCCTCACCT |
| | | CCGGGGTACACTTTTGGCCAGGGGACCAAGCTGGAGATCAAACGAACT |
| | | GTGGCTGCACCATCTGTCTTCATCTTCCCGCCATCTGATGAGCAGTTG |
| | | AAATCTGGAACTGCCTCTGTTGTG |
| H2 | 664 | GAGCTCACACTCACGCAGTCTCCGGGCACCCTGTCTTTGTCTCCAGGG |
| | | GAAAGAGGCACCCTCTCCTGCAGGGCCAGTCAGAGTGTTAGCAGCAGC |
| | | TACTTAGCCTGGTACCAGCAGAAACCTGGCCAGGCTCCCAGGCTCCTC |
| | | ATCTATGGTGCATCCAGCAGGGCCACTGGCATCCCAGACAGGTTCAGT |
| | | GGCAGTGGGTCTGGGACAGACTTCACTCTCACCATCAGCAGACTGGAG |
| | | CCTGAAGATTTTGCAGTGTATTACTGTCAGCAGTATGGTAGCTCACCT |
| | | CAGACGTTCGGCCAAGGGACCAAGGTGGAAATCAAACGAACTGTGGCT |
| | | GCACCATCTGTCTTCATCTTCCCGCCATCTGATGAGCAGTTGAAATCT |
| | | GGAACTGCCTCTGTTGTG |
| H3 | 665 | GAGCTCACACAGTCTCCAGCCACCCTGTCTGTGTCTCCAGGGGAAAGA |
| | | GCCACCCTCTCCTGCAGGGCCAGTCAGAGTGTTAGCAGCAACTTAGCC |
| | | TGGTACCAGCAGAAACCTGGCCAGGCTCCCAGGCTCCTCATCTATGGT |
| | | GCATCCACCAGGGCCACTGGTATCCCAGCCAGGTTCAGTGGCAGTGGG |
| | | TCTGGGACAGAGTTCACTCTCACCGTCAGCAGACTGGAGCCTGAAGAT |
| | | TCTGCAGTGTATTTCTGTCAGCAGTATTATAGGTCCCCACTCACTTTC |
| | | GGCGGAGGGACCAAGGTGGAGATCAAACGAACTGTGGCTGCACCATCT |
| | | GTCTTCATCTTCCCGCCATCTGATGAGCAGTTGAAATCTGGAACTGCC |
| | | TCTGTTGTG |
| I | 666 | GAGCTCACACTCACGCAGTCTCCCGCCACCCTGTCTGTTTCTCCAGGG |
| | | GAAAGAGCCACCCTTTTTTGTAGGGCCAATCAGAGTGTTGGCCGCAAC |
| | | TTAGCCTGGTACCAGCAGAAACCTGGCCAGGCTCCCAGGCTCCTCATT |
| | | TATGGTATATCCACCAGGACCACTACTACCCCAACCAGGTTCAGTGGC |
| | | AGTGGGTCTGGGACAGACTTCACTCTCACCATCAGCCGCCTGCAGTCT |
| | | GAAGATTTTGCAGTTTATTACTGTCAGCAGTATAACAAGTGGCCTCCG |
| | | TGGACGTTCGGCCAAGGGACCAAGTTGGAAATCAAACGAACTGTGGCT |
| | | GCACCATCTGTCTTCGTCTTCCCGCCATCT |
| J1 | 667 | GAGCTCGTGTTGACACAGTCTCCAGGCACCCTGTCTTTGTCTCCAGGG |
| | | GAAAGAGCCACCCTCTCCTGCAGGGCCAGTCAGAGTGTTAGCAGCAGC |
| | | TACTTAGCCTGGTACCAGCAGAAACCTGGCCAGGCTCCCAGGCTCCTC |
| | | ATCTATGGTGCATCCAGCAGGGCCACTGGCATCCCAGACAGGTTCAGT |
| | | GGCAGTGGGTCTGGGACAGACTTCGCTCTCACCATCACCAGACTGGAG |
| | | CCTGAAGATTTTGCAGTGTATTACTGTCAGCAGTATGGTAGCTCACCT |
| | | CAGACGTTCGGCCAAGGGACCAAGGTGGAAATCAAACGAACTGTGGCT |
| | | GCACCATCTGTCTTCATCTTCCCGCCATCTGATGAGCAGTTGAAATCT |
| | | GGAACTGTCTCTGTTGTG |
| J2 | 668 | GCGGCCGAGCTCACTCAGTCTCCAGGCACCCTGTCTTTGTCTCCAGGG |
| | | GAAAGAGCCACCCTCTCCTGCAGGGCCAGTCAGAGTGTTAGCAGCAGC |
| | | TACTTAGCCTGGTACCAGCAGAAACCTGGCCAGGCTCCCAGGCTCCTC |
| | | ATCTATGGTGCATCCAGCAGGGCCACTGGCATCCCAGACAGGTTCAGT |
| | | GGCAGTGGGTCTGGGACAGACTTCACTCTCACCATCAGCAGACTGGAG |
| | | CCTGAAGATTTTGCAGTGTATTACTGTCAGCAGTATGGTAGCTCACCT |
| | | CAGACGTTCGGCCAAGGGACCAAGGTGGAAATCAAACGAACTGTGGCT |
| | | GCACCATCTGTCTTCATCTTCCCGCCATCTGATGAGCAGTTGAAATCT |
| | | GGAACTGCCTCTGTTGTG |
| J3 | 669 | GAGCTCACGCAGTCTCCAGGCACCCTGTCTTTGTCTCCAGGGGAAAGA |
| | | GCCACCCTCTCCTGCAGGGCCAGTCAGAGTGTTAGCAGCAGCTACTTA |
| | | GCCTGGTACCAGCAGAAACCTGGCCAGGCTCCCAGGCTCCTCATCTAT |
| | | GGTGCATCCAGCAGGGCCACTGGCATCCCAGACAGGTTCAGTGGCAGT |
| | | GGGTCTGGGACAGACTTCACTCTCACCATCAGCGGACTGGAGCCTGAA |
| | | GATTTTGCAGTGTATTACTGTCAACAATATGGTAGCTCACCTCAGACG |
| | | TTCGGCCAAGGGACCAAGGTGGAAATCAAACGAACTGTGGCTGCACCA |
| | | TCTGTCTTCATCTTCCCGCCATCTGATGAGCAGTTGAAATCTGGAACT |
| | | GCCTCTGTT |
| J3* | 670 | GAGTTCACACTCACGCAGTCTCCAGGCACCCTGTCTTTGTCTCCAGGG |
| | | GAAAGAGGCACCCTCTCCTGCAGGGCCAGTCAGAGTGTTAGCAGCAGC |
| | | TACTTAGCCTGGTACCAGCAGAAACCTGGCCAGGCTCCCAGGCTCCTC |
| | | ATCTATGGTGCATCCAGCAGGGCCACTGGCATCCCAGACAGGTTCAGT |
| | | GGCAGTGGGTCTGGGACAGACTTCACTCTCACCATCAGCAGACTGGAG |
| | | CCTGAAGATTTTGCAGTGTATTACTGTCAGCAGTATGGTAGCTCACCT |
| | | CAGACGTTCGGCCAAGGGACCAAGGTGGAAATCAAACGAACTGTGGCT |
| | | GCACCATCTGTCTTCATCTTCCCGCCATCTGATGAGCAGTTGAAATCT |
| | | GGAACTGCCTCTGTTGTG |
| J4 | 671 | GAGCTCACACTCACGCAGTCTCCAGGCACCCTGTCTTTGTCTCCAGGG |
| | | GAAAGAGCCACCCTCTCCTGCAGGGCCAGTCAGAGTGTTAGCAGCAGC |
| | | CACTTAGCCTGGTACCAGCAGAAACCTGGCCAGGCTCCCAGGCTCCTC |
| | | ATCTATGGTGCATCCAGCAGGGCCACTGGCATCCCAGACAGGTTCAGT |
| | | GGCAGTGGGTCTGGGACAGACTTCACTCTCACCATCAGCAGACTGGAG |
| | | CCTGAAGATTTTGCAGTGTATTACTGTCAACAGTATGGTAGCTCACCT |
| | | CAGACGTTCGGCCAAGGGACCGAGGTGGAAATCAAACGAACTGTGGCT |
| | | GCACCGTCTGTCTTCATCTTCCCGCCATCTGATGAGCAGTTGAAATCT |
| | | GGAACTGCCTCTGTTGTG |
| K | 672 | GAGCTCACGCAGTCTCCAGGCACCCTGTCTTTGTCTCCAGGGGAAAGA |
| | | GCCACCCTTTCCTGCAGGGCCAGTCAGAGTGTTAGCAGCAACTCCTTA |
| | | GCCTGGTACCAACAGAAACCTGGCCTGGCTCCCAGGCTCCTCATCTAT |
| | | GGTGCATCCAGCAGGGCCACTGGCATCCCAGAGAGGTTCAGTGGCAGT |
| | | GGGGCTGGGACAGGCTTCACTCTCACCATCAGCACACTGGAGCCTGAA |
| | | GATTTTGCAATTTATTACTGTCAACAATATGGTGGCTCGCCTCCAAGA |
| | | TTCACTTTCGGCCCTGGGACCAAAGTGGATATCAGACGAACTGTGGCT |
| | | GCACCATCTGTCTTCATCTTCCCGCCATCTGATGAGCAGTTGAAATCT |
| | | GGAACTGCCTCTGTTGTG |
| L1 | 673 | GAGCTCACGCAGTCTCCAGGCACCCTGTCGTTGTCTCCAGGGGAAAGA |
| | | GCCACTCTCTCCTGCAGGGCCAGTCAGAGTATTACCAGCAGGTACTTA |
| | | GCCTGGTACCAGCAGAAACCTGGCCAGGCTCCCAGGCTCCTCATCTAT |
| | | GGTGCATCCAGCAGGGCCACTGGCATCCCAGACAGGTTCAGTGGCAGT |
| | | GGGTCTGGGACAGACTTCACTCTCACCATCAGCAGACTGGAGCCTGAA |
| | | GATTTTGCAGTGTATTACTGTCAGCAGTATGGTGACTCCGTCGGTTTC |
| | | GGCCCTGGGACCAAAGTGGAAATCAAACGAACTGTGGCTGCACCATCT |
| | | GTCTTCATCTTCCCGCCATCTGATGAGCAGTTGAAATCTGGAACTGCC |
| | | TCTGTTGTG |
| L2 | 674 | GAGCTCACGCAGTCTCCAGGCACCCTGTCGTTGTCTCCAGGGGAAAGA |
| | | GCCACTCTCTCCTGCAGGGCCAGTCAGAGTATTACCAGCAGGTACTTA |
| | | GCCTGGTACCAGCAGAAACCTGGCCAGGCTCCCAGGCTCCTCATCTAT |
| | | GGTGCATCCAGCAGGGCCACTGGCATCCCAGACAGGTTCAGTGGCAGT |
| | | GGGTCTGGGACAGACTTCACTCTCACCATCAGCAGACTGGAGCCTGAA |
| | | GATTTTGCAGTGTATTACTGTCAGCAGTATGGTGACTCCGTCGGTTTC |
| | | GGCCCTGGGACCAAAGTGGAAATCAAACGAACTGTGGCTGCACCATCT |
| | | GTCTTCATCTTCCCGCCATCTGATGAGCAGTTGAAATCTGGAACTGCC |
| | | TCTGTTGTG |
| L3 | 675 | GAGCTCGTGATGACGCAGTCTCCAGCCACCCTGTCTTTGTCTCCAGGG |
| | | GAAAGAGCCACCCTCTCCTGCAGGGCCAGTCAGAGTGTTGGCAGCTAC |
| | | TTAGCCTGGTACCAACAGAAACCTGGCCAGGCTCCCAGGCTCCTCATT |
| | | TATGATGCATCCAACAGGGCCACTGGCATCCCAGCCAGGTTCAGTGGC |
| | | AGTGGGTCTGGGACAGACTTCACTCTCACCATCAGCAGCCTAGAGCCT |
| | | GAAGATTTTGCTGTGTATTTTTGTCAGCAGTATGGTAGCTCACCCTTG |
| | | ACGTTCGGCCAAGGGACCAAGGTGGAAATCAAACGAACTGTGGCTGCA |
| | | CCATCTGTCTTCATCTTCCCGCCATCTGATGAGCAGTTGAAATCTGGA |
| | | ACTGCCTCTGTTGTG |
| L4 | 676 | GAGCTCACGCAGTCTCCAGGCACCCTGTCTTTGTCTCCAGGGGAAAGA |
| | | GCCACCCTCTCTTGTAGGGCCGGTCAGACTGTTGCGAGCAATTCCTTA |
| | | GCCTGGTATCAGCACAAACCTGGCCAGGCTCCCAGGCTCCTCATCTAT |
| | | GGTGCCTCCATCAGGGCCAGTGGCATCCCAGACAGGTTCAGTGGCAGT |
| | | GGGTCTGGGACAGACTTCACTCTCACCATCAGCAGACTGGAGCCTGAA |
| | | GATTTTGCAGTGTATTACTGTCAGCAGTATGGTCTTTCTTCCACCTTC |
| | | GGCCAAGGGACACGACTGGAGATTAAACGAACTGTGGCTGCACCATCT |
| | | GTCTTCATCTTCCCGCCATCTGATGAGCAGTTGAAATCTGGAACTGCC |
| | | TCTGTTGTG |
| M | 677 | GAGCTCACACTCACGCAGTCTCCAGGCACCCTGTCTTTGTCTCCAGGG |
| | | GAAAGAGCCACCCTCTCCTGCAGGGCCAGTCAGAGTATTAGGAGCAGT |
| | | TACTTAGCCTGGTACCAGCAGAAACCTGGCCAGGCTCCCAGGCTCCTC |
| | | ATCTATGCTGCAGCCAGCAGGGCCACTGGCATCCCAGACAGGTTCAGT |
| | | GGCAGTGGGTCTGGGACAGACTTCACTCTCACCATCAGCAGACTGGAG |
| | | CCTGAAGATTTTGCAGTGTATTTCTGTCATCACTATGGTGGCTCACCT |
| | | CGGACGTTCGGCCAAGGGACCAAGGTGGAAATCAAACGAACGGTGGCT |
| | | GCACCATCTGTCTTCATCTTCCCGCCATCTGATGAGCAGTTGAAATCT |
| | | GGAACT |
| N1 | 1043 | GAGCTCACACAGTCTCCAGGCACCCTGTCTTTGTCTCCAGGGGAAAGA |
| | | GCCACCCTCTCCTGCAGGGCCAGTCAGAGTGTTAGCAGCAGCTACTTA |
| | | GCCTGGTACCAGCAGAAACCTGGCCAGGCTCCCAGGCTCCTCATCTAT |
| | | GGTGCATCCAACAGGGCCGCTGGCATCCCAGACAGGTTCAGTGGCAGT |
| | | GGGTCTGGGGCAGACTTCACTCTCACCATCAGCAGACTGGAGCCTGAA |
| | | GATTTTGCAGTGTATTACTGTCAGCAGTATGGTAGCTCACTTATCACC |
| | | TTCGGCCAAGGGACACGACTGGAGATTAAACGAACT |
| N2 | 1044 | GAGCTCACGCAGTCTCCAGGCACCCTGTCTTTGTTTCCAGGGGAAAGA |
| | | GCCACCCTCTCCTGCAGGGCCAGTCAGAGTATTCTCGGCAGATACTTA |
| | | GCCTGGTATCAGCAGAAAGGCGGCCGGGCTCCCAGACTCCTCATCTTT |
| | | GGTGCATCCAAGAGGGCCACTGGCATCCCAGACAGGTTCAGTGGCAGT |
| | | GGGTCTGGGACAGACTTCACTCTCACCATCGGCAGACTGGAGCCTGAA |
| | | GATTTTGCAGTGTATTACTGTCAGCACTATGGTAGTTCAATCACCTTC |
| | | GGCCAAGGGACACGGCTGGACATTAAACGAACT |
| N3 | 1045 | GAGCTCACGCAGTCTCCAGGCACCCTGTCTTTGTCTCCAGGGGAAAGA |
| | | GCCACCCTCTCCTGCAGGGCCAGTCAGAGTGTTAGCAGCAGCTACTTA |
| | | GCCTGGTACCAGCAGAAACCTGGCCAGGCTCCCAGGCTCCTCATCTAT |
| | | GGTGCATCCAGCAGGGCCACTGGCATCCCAGACAGGTTCAGTGGCAGT |
| | | GGGTCTGGGACAGACTTCACTCTCACCATCAGCAGACTGGAGCCTGAA |
| | | GATTTTGCAGTGTATTACTGTCAGCAGTATGGTAGCTCCCTCACTTTC |
| | | GGCGGAGGGACCAAGGTGGAGATCAAACGAACT |
| N4 | 1046 | GAGCTCACACTCACGCAGTCTCCAGGCACCCTGTCTTTGTCTCCAGGG |
| | | GAAAGAGCCACCCTCTCCTGCAGGGCCAGTCAGAGTGTTAGCAACAAC |
| | | TACTTAGCCTGGTACCAGCAGAAACCTGGCCAGGCTCCCAGGCTCCTC |
| | | ATCTATGGTGCATCCAGCAGGGCCACTGGCATCCCAGACAGGTTCAGT |
| | | GGCAGTGGGTCTGGGACAGGCTTCACTCTCATCATCAGCAGACTGGAG |
| | | CCTGAAGATTTTGCAGTGTATTACTGTCAGCAGTATGGTAGCTCTTCG |
| | | ATCACCTTCGGCCAAGGGACACGACTGGAGATTAAACGAACT |
| O1 | 1047 | GAGCTCACTCAGTCTCCATCGTCCCTGTCTGCATCGGTAGGAGATAGA |
| | | GTCACCATCACTTGCCGGGCAACTCAGGGCATTGACAACTATTTAAAT |
| | | TGGTATCAGCAAAAACCGGGGAAACCCCCTAGGCTCCTCATCTATGGT |
| | | GCATCCAGTTTGCAAAGTGGGGTCCCATCAAGATTTAGTGGCGGTGGA |
| | | TCTGGGACACATTTCACTCTCACCATCACCAATCTGCAACCTGAAGAT |
| | | TTTGCAACTTACTACTGTCAACAGAGTTACAGTACCCCTCCGGAGACG |
| | | TTCGGCCAGGGGACCAAGGTGGAAATCAAACGAACT |
| P1 | 1048 | GAGCTCACGCAGTCTCCAGGCACCCTGTCTTTGTCTCCAGGGGAAAGA |
| | | GCCACCCTCTCCTGCAGGGCCAGTCAGGTGCGTGGCTTCTTAGCCTGG |
| | | TTCCAGCAGAAACCTGGCCAGGCTCCCAGACTCCTCATCTATGGTGCA |
| | | TCCAACAGGGCCCCTGGAATCCCAGACAGGTTCAGTGGCAGTGGGTCT |
| | | GGGACAGACTTCACTCTCACCATCAGCAGACTGGAGCCTGAAGATTTT |
| | | GCAGTGTATTACTGTCAGCAGTATGGTGACTCACCTCCGATCACCTTC |
| | | GGCCAAGGGACACGACTGGAGATTAAAAGAACT |
| P1a | 1049 | GAGCTCACACAGTCTCCAGGCACCCTGTCTTTGTCTCCAGGGGAAAGA |
| | | GCCACCCTCTCCTGCAGGACCAGTCAGAGTGTTAGCAGCACTTACTTA |
| | | GCCTGGTACCAGCAGAAACCTGGCCAGCCTCCCAGGCTCCTCATCTAT |
| | | GGTGCATCCAATAGGGCCCCTGGAATCCCAGACAGGTTCAGTGGCAGT |
| | | GGGTCTGGGACAGACTTCACTCTCACCATCAGCAGACTGGAGCCTGAA |
| | | GATTTTGCAGTGTATTACTGTCAGCAGTATGGTGACTCACCTCCGATC |
| | | ACCTTCGGCCAAGGGACACGACTGGACATTAAAAGAACT |
| P2 | 1050 | GAGCTCGTGTTGACGCAGTCTCCAGGCACCCTGTCTTTGTCTCCAGGG |
| | | GAAAGAGCCACCCTCTCCTGCAGGGCCAGTCAGAGTGTTAGCAGCAGC |
| | | TACTTAGCCTGGTACCAGCAGAAACCTGGCCAGGCTCCCAGGCTCCTC |
| | | ATCTATGGTGCATCCAGCAGGGCCACTGGCATCCCAGACAGGTTCAGT |
| | | GGCAGTGGGTCTGGGACAGACTTCACTCTCACCATCAGCAGACTGGAG |
| | | CCTGAAGATTTTGCAGTGTATTACTGTCAGCAGTATGGTAGCTCACCC |
| | | TTTTTCGGCCCTGGGACCAAAGTGGATATCAAACGAACT |
| P3 | 1051 | GAGCTCACGCAGTCTCCAGGCACCCTGTCTTTGTCTCCAGGGGAAAGA |
| | | GCCACCCTCTCCTGCAGGGCCAGTCAGAGTGTTAGCAGCACCTACTTA |
| | | GCCTGGTACCAGCAGAAACCTGGCCAGGCTCCCAGGCTCCTCATCTAT |
| | | GGTGCATCCAGCAGGGCCACTGGCATCCCAGACAGGTTTAGTGGCAGT |
| | | GGGTCTGGGACAGACTTCACTCTCACCATCAGCAGACTGGAGCCTGAA |
| | | GATTTTGCAGTGTATTACTGTCAGCAGTATGGTAGCTCACCGCTCACT |
| | | TTCGGCGGAGGGACCAAGGTGGAGATCAAACGAACT |
| P4 | 1052 | GAGCTCACTCAGTCTCCAGGCACCCTGTCTCTGTCTCCAGGGGAAAGA |
| | | GCCACCCTCTCCTGCAGGGCCAGTCAGAGTGTTAGCAGCAGCAACTTA |
| | | GCCTGGTTCCAGCATAAATCTGGCCGGGCTCCCAGGCTCCTCATCTAT |
| | | GGTGCATCCAACAGGGCCCCTGACATCCCAGACAGGTTCAGTGGCAGT |
| | | GGGTCTGGGACAGACTTCACTCTCAGCATCAGCAGACTGGAGCCTGAA |
| | | GATTTTGCAGTGTATTACTGTCAGCGGTATGGTGACTCACCTCCGATC |
| | | ACCTTCGGCCAAGGGACACGACTGGAGATTAAACGAACT |
| P5 | 1053 | GAGCTCACACAGTCTCCAGCCTCCCTGTCTTTGTCTCCAGGGGAAAGG |
| | | GCCACCCTCTCCTGCAGGGCCAGTCAGAGTGTTGGCACCTACTTTGCC |
| | | TGGTACCAACAGAAACCTGGCCAGGCTCCCAGGCTCCTCATCTATGGT |
| | | GCGTCCAACAGGGCCACTGGCATCCCAGACAGGTTCAGTGGCAGTGGG |
| | | TCTGGGACAGACTTCACCCTCACCGTCAGCAGACTGGAACCTGAAGAT |
| | | TTTGCAGTGTATTACTGTCAGCAGTATGGTAGCTCACCGACGTTCGGC |
| | | CAAGGGACCAAGGTGGAAATCAAACGAACT |
| P6 | 1054 | GAGCTCATTCAGTCTCCAGGCACCCTGTTTTTGTCTTCAGGGGAAAGA |
| | | GCCACCCTCTCCTGCAGGGCCAGTCAGAGTGTTAGCAGCAGCAACTTA |
| | | GCCTGGTTCCAGCATAAATCTGGCCGGGCTCCCAGGCTCCTCATCTAT |
| | | GGTGCATCCAACAGGGCCCCTGACATCCCAGACAGGTTCAGTGGCAGT |
| | | GGGTCTGGGACAGACTTCACTATCAGCATCAGCAGACTGGAGCCTGAA |
| | | GATTTTGCAGTGTATTACTGTCAGCGGTATGGTGACTCACCTCCGATC |
| | | ACCTTCGGCCAAGGGACACGACTGGAGATTAAACGAACT |
| Q1 | 1055 | GAGCTCACGCAGTCTCCAGGCACCCTGTCTTTGTCTCCAGGGGAAAGA |
| | | GCCACCCTCTCCTGCAGGGCCAGTCAGAGTGTTAGCAGCAGCTACTTA |
| | | GCCTGGTACCAGCAGAAACCTGGCCAGGCTCCCAGGCTCCTCATCTAT |
| | | GGTGCATCCAGCAGGGCCACTGGCATCCCAGACAGGTTCAGTGGCAGT |
| | | GGGTCTGGGACAGACTTCACTCTCACCATCAGCAGACTGGAGCCTGAA |
| | | GATTTTGCAGTGTATTACTGTCAACAGTATGGTAGCTCACCTCAGACG |
| | | TTCGGCCAAGGGACCAAGGTGGAAATCAAACGAACT |
| Q2 | 1056 | GAGCTCACGCAGTCTCCAGCCTCCCTGTCTCTGTCTCCAGGGGGAAGC |
| | | GCCACCCTCGCCTGCAGGGCCAGCCGGGGTGTTAACAGCAACCTAGCC |
| | | TGGTATCACCAGAGGCCTGGCCAGGCTCCCAGGCTCCTCATTTATAGT |
| | | GCATCTACCAGGGCCACTGGTATCCCAGGCAGGTTCAGCGGCAGTGGG |
| | | TTTGGGACAGAGTTCACTCTCACCATCAACAATCTGCAGTCTGACGAC |
| | | TTTGGAGTTTATTACTGTCAGCAGTATGATGACACGCCTCAGATCACC |
| | | TTCGGCCAGGGAACACGACTGGACATTAAACGGCTGGACATTAAGCGA |
| | | ACT |
| R1 | 1057 | GAGCTCACTCAGTCTCCACTCTCCCTGCCCGTCACCCCTGGAGAGCCG |
| | | GCCTCCATCTCCTGCAGGTCTAGTTACAGCCTCCTCCATATTAATGGA |
| | | TACAAGTATTTGGATTGGTACCTGCAGAGGCCAGGGCAGTCTCCACAG |
| | | CTCCTGATCTATTTGGGTTCTAATCGGGCCCCCGGGGTCCCTGACAGG |
| | | TTCAGTGGCAGTGGATCAGGCACATCTTTTACACTGAAAATCAGCAGA |
| | | GTGGAGGCTGAGGATGTTGGGGTTTATTACTGCATGCAAAGTCTTCAA |
| | | GCTCCGTGGACGTTCGGCCAAGGGACCAAGGTGGAAATGAAACGAACT |
| S1 | 1058 | GAGCTCGTGTTGACACAGTCTCCAGGCACCCTGTCTTTGTCTCCAGGG |
| | | GAAAGAGCCACCCTCTCCTGCAGGGCCAGTCAGAGTGTTAGCAGCAGC |
| | | TACTTAGCCTGGTACCAGCAGAAACCTGGCCAGGCTCCCAGGCTCCTC |
| | | ATCTATGGTGCATCCAGCAGGGCCACTGGCATCCCAGACAGGTTCAGT |
| | | GGCAGTGGGTCTGGGACAGACTTCACTCTCACCATCAGCAGACTGGAG |
| | | CCTGAAGATTTTGCAGTGTATTACTGTCAGCAGTATGGTAGCTCACCT |
| | | CAGACGTTCGGCCAAGGGACCAAGGTGGAAATCAAACGAACT |
| T1 | 1059 | GAGCTCACGCAGTCTCCAGGCACCCTGTCTTTGTCTCCAGGGGAAAGA |
| | | GCCACCCTCTCCTGCAGGGCCAGTCAGAGTGTTAGCAGCAGCTACTTA |
| | | GCCTGGTACCAGCAGAAACCTGGCCAGGCTCCCAGGCTCCTCATCTAT |
| | | GGTGCATCCAGCAGGGCCACTGGCATCCCAGACAGGTTCAGTGGCAGT |
| | | GGGTCTGGGACAGACTTCACTCTCACCATCAGCAGACTGGAGCCTGAA |
| | | GATTTTGCAGTGTATTACTGTCAACAGTATGGTAGCTCACCTCAGACG |
| | | TTCGGCCAAGGGACCAAGGTGGAAATCAAACGAACT |
| U1 | 1060 | GAGCTCACCCAGTCTCCATCCTCCCTGTCTGCATCTGTAGGAGACAGA |
| | | GTCACCATCACTTGCCGGGCAAGTCAGAGCATTAGCAGCTTTTTAAAT |
| | | TGGTATCAGCAGAAACCAGGGAAAGCCCCTAAGCTCCTGATCTATGCT |
| | | GCATCCAGTTTGCAAAGTGGGGTCCCACCAAGGTTCAGTGGCAGTGGA |
| | | TCTGGGACAGATTTCACTCTCACCATCAGCAGTCTGCAACCTGAAGAT |
| | | TTTGCAACTTACTACTGTCAACAGAGTTACAGTACCCCTCGCACTTTT |
| | | GGCCAGGGGACCAAGCTGGAGATCAAACGAACT |
| V1 | 1061 | GAGCTCACCCAGTCTCCATCCTCCCTGTCTGCATCTGTAGGAGACAGA |
| | | GTCACCATCACTTGCCAGGCAAGTCAAGACATTAGCAACTTTTTAAAT |
| | | TGGTATCAACGGAGACCTGGGAAAGCCCCTAATCTCCTGATCTACGAT |
| | | GCAACCCATTTGGAAACAGGGGTCCCATCAAGGTTCAGTGGAAGTGGA |
| | | TTTGGGACACATTTTACTCTCACCATCAACAGCCTGCAGCCTGAAGAT |
| | | ATTGGTACATATTACTGTCAACACTTTGATGACGTCCCCTCTTTCACT |
| | | TTCGGCCCTGGGACCAAAGTGGATCTCAAACGAACT |

[0259] Also exemplary of the nucleic acids provided herein are those that encode a CDR1 set forth in SEQ ID NOS: 78-108; 171-205; 725-741, 778-796, 1090, 1091 and 1101-1113; a CDR2 set forth in SEQ ID NOS: 109-139; 206-240; 742-759, 797-815, 1092-1096 and 1114-1121; and a CDR3 set forth in SEQ ID NOS: 140-170; 241-275; 760-777, 816-834, 1097-1100 and 1122-1133. Further, included herein are nucleic acids that encode any of the framework regions set forth in SEQ ID NOS: 309-572, 835-982 and 1134-1205. These nucleic acids can be inserted into an expression cassette or expression vector such that they are operably linked to expression control sequences.

[0260] Nucleic acid molecules encoding the polypeptides and anti-HCV antibodies or antigen-binding fragments thereof provided herein can be prepared using well-known recombinant techniques for manipulation of nucleic acid molecules (see, e.g., techniques described in Sambrook et al., (1990) Molecular Cloning, A Laboratory Manual, 2d Ed., Cold Spring Harbor Laboratory, Cold Spring Harbor, N.Y. and Ausubel et al., eds. (1998) Current Protocols in Molecular Biology, John Wiley & Sons, NY). In some examples, methods, such as, but not limited to, recombinant DNA techniques, site directed mutagenesis, and polymerase chain reaction (PCR) can be used to generate modified antibodies or antigen-binding fragments thereof having a different amino acid sequence, for example, to create amino acid substitutions, deletions, and/or insertions.

[0261] Polypeptides and antibodies having sequences other than those shown in Tables 3 and 4, e.g. those having other combinations of CDR and/or framework sequences shown in Tables 9, 10, 11, 18, 19, 30 and 31, also can be produced by recombinant expression. First, nucleic acids encoding these polypeptides and antibodies can be constructed by switching the regions of these molecules that encode the CDR and/or framework sequences. In particular, the nucleic acid encoding a first polypeptide can be modified by insertion or replacement of nucleic acid regions encoding, for example, a CDR region, a framework region or a constant region, from another nucleic acid encoding a second polypeptide using known recombinant techniques. Alternatively, nucleic acids encoding each CDR and framework sequences shown in Tables 9, 10, 11, 18, 19, 30 and 31 can be synthesized using conventional methods of oligonucleotide synthesis and/or polymerase chain reaction (PCR).

[0262] Nucleic acids encoding each CDR and framework sequence set forth in Tables 9, 10, 11, 18, 19, 30 and 31 can be determined using methods and software known in the art. Examples of coding nucleotide sequences for the exemplary Fab heavy and light chains are shown in Tables 5 and 6. Due to redundancy in the genetic code, other nucleotide sequences also can code for these Fab heavy and light polypeptide sequences. Software that can be used to identify the nucleic acid sequences that code for each CDR and framework sequences are available in the art, see, for example, the software tools Translate, BCM search launcher, Reverse Translate, Reverse Transcription and Translation Tool available at expasy.org/tools/#translate.

[0263] Nucleic acids encoding selected CDR and framework sequences can be joined by splicing using overlapping extension PCR, and the resulting nucleic acid inserted into an expression vector for expression in a bacterial or mammalian host cell as described below. See, for example, Horton et al., Biotechniques 8:528-535 (1990). Nucleic acid sequences encoding constant regions of the light and heavy chains of human and other mammalian antibodies are known in the art and can be obtained from the public databases such as Genbank. Examples of nucleic acid sequences encoding constant regions are also described in Kabat et al., Sequences of Proteins of Immunological Interest, 5^{th} Edition, National Institutes of Health Publication No. 91-3242 (1991). See the Cold Spring Harbor Laboratory Manuals cited below for the details involved in DNA sequence engineering. Nucleic acid sequences encoding individual CDR and framework sequences also can be synthesized using known techniques such as, for example, solid phase synthesis. Polypeptides also can be produced through synthetic methods well-known in the art (Merrifield, Science, 85:2149 (1963)).

[0264] b. Vectors

[0265] Provided herein are vectors that contain nucleic acid encoding the polypeptides and anti-HCV antibodies or antigen-binding fragments thereof. Many expression vectors are available and known to those of skill in the art and can be used for expression of polypeptides. See for example, CURRENT PROTOCOLS IN MOLECULAR BIOLOGY, Ausubel et al. eds., John Willey & Sons, Inc. 1999; see also U.S. Pat. Nos. 5,667,992 and 7,238,356. The choice of expression vector will be influenced by the choice of host expression system. Such selection is well within the level of skill of the skilled artisan. In general, expression vectors can include transcriptional promoters and optionally enhancers, translational signals, and transcriptional and translational termination signals. Expression vectors that are used for stable transformation typically have a selectable marker which allows selection and maintenance of the transformed cells. In some cases, an origin of replication can be used to amplify the copy number of the vector in the cells.

[0266] Vectors also can contain additional nucleotide sequences operably linked to the ligated nucleic acid molecule, such as, for example, an epitope tag such as for localization, e.g. a his₆ tag or a myc tag, or a tag for purification, for example, a GST fusion, and a sequence for directing protein secretion and/or membrane association.

[0267] Expression of the polypeptides and anti-HCV antibodies or antigen-binding fragments thereof can be controlled by any promoter/enhancer known in the art. Suitable bacterial promoters are well known in the art and described herein below. Other suitable promoters for mammalian cells, yeast cells and insect cells are well known in the art and some are exemplified below. Selection of the promoter used to direct expression of a heterologous nucleic acid depends on the particular application and is within the level of skill of the skilled artisan. Promoters which can be used include but are not limited to eukaryotic expression vectors containing the SV40 early promoter (Bernoist and Chambon, Nature 290:304-310 (1981)), the promoter contained in the 3′ long terminal repeat of Rous sarcoma virus (Yamamoto et al. Cell 22:787-797 (1980)), the herpes thymidine kinase promoter (Wagner et al., Proc. Natl. Acad. Sci. USA 78:1441-1445 (1981)), the regulatory sequences of the metallothionein gene (Brinster et al., Nature 296:39-42 (1982)); prokaryotic expression vectors such as the β-lactamase promoter (Jay et al., (1981) Proc. Natl. Acad. Sci. USA 78:5543) or the tac promoter (DeBoer et al., Proc. Natl. Acad. Sci. USA 80:21-25 (1983)); see also “Useful Proteins from Recombinant Bacteria”: in Scientific American 242:79-94 (1980)); plant expression vectors containing the nopaline synthetase promoter (Herrera-Estrella et al., Nature 303:209-213 (1984)) or the cauliflower mosaic virus 35S RNA promoter (Gardner et al., Nucleic Acids Res. 9:2871 (1981)), and the promoter of the photosynthetic enzyme ribulose bisphosphate carboxylase (Herrera-Estrella et al., Nature 310:115-120 (1984)); promoter elements from yeast and other fungi such as the Gal4 promoter, the alcohol dehydrogenase promoter, the phosphoglycerol kinase promoter, the alkaline phosphatase promoter, and the following animal transcriptional control regions that exhibit tissue specificity and have been used in transgenic animals: elastase I gene control region which is active in pancreatic acinar cells (Swift et al., Cell 38:639-646 (1984); Ornitz et al., Cold Spring Harbor Symp. Quant. Biol. 50:399-409 (1986); MacDonald, Hepatology 7:425-515 (1987)); insulin gene control region which is active in pancreatic beta cells (Hanahan et al., Nature 315:115-122 (1985)), immunoglobulin gene control region which is active in lymphoid cells (Grosschedl et al., Cell 38:647-658 (1984); Adams et al., Nature 318:533-538 (1985); Alexander et al., Mol. Cell Biol. 7:1436-1444 (1987)), mouse mammary tumor virus control region which is active in testicular, breast, lymphoid and mast cells (Leder et al., Cell 45:485-495 (1986)), albumin gene control region which is active in liver (Pinckert et al., Genes and Devel. 1:268-276 (1987)), alpha-fetoprotein gene control region which is active in liver (Krumlauf et al., Mol. Cell. Biol. 5:1639-1648 (1985); Hammer et al., Science 235:53-58 1987)), alpha-1 antitrypsin gene control region which is active in liver (Kelsey et al., Genes and Devel. 1:161-171 (1987)), beta globin gene control region which is active in myeloid cells (Magram et al., Nature 315:338-340 (1985); Kollias et al., Cell 46:89-94 (1986)), myelin basic protein gene control region which is active in oligodendrocyte cells of the brain (Readhead et al., Cell 48:703-712 (1987)), myosin light chain-2 gene control region which is active in skeletal muscle (Shani, Nature 314:283-286 (1985)), and gonadotrophic releasing hormone gene control region which is active in gonadotrophs of the hypothalamus (Mason et al., Science 234:1372-1378 (1986)).

[0268] In addition to the promoter, the expression vector typically contains a transcription unit or expression cassette that contains all the additional elements required for the expression of the antibody, or portion thereof, in host cells. A typical expression cassette contains a promoter operably linked to the nucleic acid sequence encoding the germline antibody chain and signals required for efficient polyadenylation of the transcript, ribosome binding sites and translation termination. Additional elements of the cassette can include enhancers. In addition, the cassette typically contains a transcription termination region downstream of the structural gene to provide for efficient termination. The termination region can be obtained from the same gene as the promoter sequence or can be obtained from different genes.

[0269] Some expression systems have markers that provide gene amplification such as thymidine kinase and dihydrofolate reductase. Alternatively, high yield expression systems not involving gene amplification are also suitable, such as using a baculovirus vector in insect cells, with a nucleic acid sequence encoding a germline antibody chain under the direction of the polyhedron promoter or other strong baculovirus promoter.

[0270] Any methods known to those of skill in the art for the insertion of DNA fragments into a vector can be used to construct expression vectors containing a nucleic acid encoding an antibody or antigen-binding fragment thereof provided herein. These methods can include in vitro recombinant DNA and synthetic techniques and in vivo recombinants (genetic recombination). The insertion into a cloning vector can, for example, be accomplished by ligating the DNA fragment into a cloning vector which has complementary cohesive termini. If the complementary restriction sites used to fragment the DNA are not present in the cloning vector, the ends of the DNA molecules can be enzymatically modified. Alternatively, any site desired can be produced by ligating nucleotide sequences (linkers) onto the DNA termini; these ligated linkers can contain specific chemically synthesized nucleic acids encoding restriction endonuclease recognition sequences.

[0271] Exemplary plasmid vectors useful to produce the antibodies or antigen-binding fragments provided herein contain a strong promoter, such as the HCMV immediate early enhancer/promoter or the MHC class I promoter, an intron to enhance processing of the transcript, such as the HCMV immediate early gene intron A, and a polyadenylation (polyA) signal, such as the late SV40 polyA signal. The plasmid can be multicistronic to enable expression of the full-length heavy and light chains of the antibody, a single chain Fv fragment or other immunoglobulin fragments.

[0272] In particular examples, polypeptides of antigen-binding fragments (e.g. Fabs and F(ab′)₂) can be converted into the IgG, IgM, IgA, IgD or IgE form by cloning into expression vectors that encode the appropriate constant regions. See, for example, the methods and vectors described by Burton et al., Science 266, 1024-27 (1994) and Law et al., Nature Medicine 14:25-27 (2008).

[0273] c. Cell Expression Systems

[0274] Nucleic acids encoding the anti-HCV antibodies or antigen-binding fragments thereof provided herein can be expressed in a suitable host. Cells containing the vectors and nucleic acids encoding the anti-HCV antibodies or antigen-binding fragments thereof provided herein are provided. Generally, any cell type that can be engineered to express heterologous DNA and has a secretory pathway is suitable. Expression hosts include prokaryotic and eukaryotic organisms, such as bacterial cells (e.g. E. coli), yeast cells, fungal cells, Archae, plant cells, insect cells and animal cells including human cells. Expression hosts can differ in their protein production levels as well as the types of post-translational modifications that are present on the expressed proteins. Further, the choice of expression host is often related to the choice of vector and transcription and translation elements used. For example, the choice of expression host is often, but not always, dependent on the choice of precursor sequence utilized. For example, many heterologous signal sequences can only be expressed in a host cell of the same species (i.e., an insect cell signal sequence is optimally expressed in an insect cell). In contrast, other signal sequences can be used in heterologous hosts such as, for example, the human serum albumin (hHSA) signal sequence which works well in yeast, insect, or mammalian host cells and the tissue plasminogen activator pre/pro sequence which has been demonstrated to be functional in insect and mammalian cells (Tan et al., (2002) Protein Eng. 15:337). The choice of expression host can be made based on these and other factors, such as regulatory and safety considerations, production costs and the need and methods for purification. Thus, the vector system must be compatible with the host cell used.

[0275] Expression in eukaryotic hosts can include expression in yeasts such as Saccharomyces cerevisiae and Pichia pastoris, insect cells such as Drosophila cells and lepidopteran cells, plants and plant cells such as tobacco, corn, rice, algae, and lemna. Eukaryotic cells for expression also include mammalian cell lines such as Chinese hamster ovary (CHO) cells or baby hamster kidney (BHK) cells. Eukaryotic expression hosts also include production in transgenic animals, for example, including production in serum, milk and eggs.

[0276] Recombinant molecules can be introduced into host cells via, for example, transformation, transfection, infection, electroporation and sonoporation, so that many copies of the gene sequence are generated. Generally, standard transfection methods are used to produce bacterial, mammalian, yeast, or insect cell lines that express a large quantity of antibody chains, which are then purified using standard techniques (see e.g., Colley et al. (1989) J. Biol. Chem., 264:17619-17622; Guide to Protein Purification, in Methods in Enzymology, vol. 182 (Deutscher, ed.), 1990). Transformation of eukaryotic and prokaryotic cells are performed according to standard techniques (see, e.g., Morrison (1977) J. Bact. 132:349-351; Clark-Curtiss and Curtiss (1983) Methods in Enzymology, 101, 347-362). For example, any of the well-known procedures for introducing foreign nucleotide sequences into host cells can be used. These include the use of calcium phosphate transfection, polybrene, protoplast fusion, electroporation, biolistics, liposomes, microinjection, plasma vectors, viral vectors (e.g., baculovirus, vaccinia virus, adenovirus and other viruses), and any other well known method for introducing cloned genomic DNA, cDNA, plasmid DNA, cosmid DNA, synthetic DNA or other foreign genetic material into a host cell.

[0277] Exemplary bacterial host cells that can be used to express the polypeptides, including antibodies and fragments thereof, include E. coli XL1-Blue, Top10 and BL21. Exemplary mammalian host cells for expression of the polypeptides, including antibodies and fragments thereof, include Chinese hamster ovary (CHO) cells and HEK293 cells. These host cells are capable of expressing appropriately folded immunoglobulin polypeptide. For example, Fabs and F(ab′)₂ can be produced in bacterial or mammalian cells, and IgGs can be produced in mammalian cells. Thus, the polypeptides provided herein can be produced as assembled Fabs or IgGs in bacteria or mammalian cells, and then purified from bacterial periplasmic extract or cell culture medium using, for example, protein A- or protein G-conjugated agarose.

[0278] i. Prokaryotic Expression

[0279] Prokaryotes, especially E. coli, provide a system for producing large amounts of proteins and can be used to express the polypeptides and anti-HCV antibodies or antigen-binding fragments thereof provided herein. Typically, E. coli host cells are used for amplification and expression of the provided variant polypeptides. Transformation of E. coli is a simple and rapid technique well known to those of skill in the art. Expression vectors for E. coli can contain inducible promoters, such promoters are useful for inducing high levels of protein expression and for expressing proteins that exhibit some toxicity to the host cells. Examples of inducible promoters include the lac promoter, the trp promoter, the hybrid tac promoter, the T7 and SP6 RNA promoters and the temperature regulated λPL promoter.

[0280] Proteins, such as any provided herein, can be expressed in the cytoplasmic environment of E. coli. For some polypeptides, the cytoplasmic environment, can result in the formation of insoluble inclusion bodies containing aggregates of the proteins. Reducing agents such as dithiothreitol and β-mercaptoethanol and denaturants, such as guanidine-HCl and urea can be used to resolubilize the proteins, followed by subsequent refolding of the soluble proteins. An alternative approach is the expression of proteins in the periplasmic space of bacteria which provides an oxidizing environment and chaperonin-like disulfide isomerases and can lead to the production of soluble protein. For example, for phage display of the proteins, the proteins are exported to the periplasm so that they can be assembled into the phage. Typically, a leader sequence is fused to the protein to be expressed which directs the protein to the periplasm. The leader is then removed by signal peptidases inside the periplasm. Examples of periplasmic-targeting leader sequences include the pelB leader from the pectate lyase gene and the leader derived from the alkaline phosphatase gene. In some cases, periplasmic expression allows leakage of the expressed protein into the culture medium. The secretion of proteins allows quick and simple purification from the culture supernatant. Proteins that are not secreted can be obtained from the periplasm by osmotic lysis. Similar to cytoplasmic expression, in some cases proteins can become insoluble and denaturants and reducing agents can be used to facilitate solubilization and refolding. Temperature of induction and growth also can influence expression levels and solubility, typically temperatures between 25° C. and 37° C. are used. Typically, bacteria produce non-glycosylated proteins. Thus, if proteins require glycosylation for function, glycosylation can be added in vitro after purification from host cells.

[0281] ii. Yeast Cells

[0282] Yeasts such as Saccharomyces cerevisae, Schizosaccharomyces pombe, Yarrowia lipolytica, Kluyveromyces lactis and Pichia pastoris are well known yeast expression hosts that can be used to express the anti-HCV antibodies or antigen-binding fragments thereof provided herein. Yeast can be transformed with episomal replicating vectors or by stable chromosomal integration by homologous recombination. Typically, inducible promoters are used to regulate gene expression. Examples of such promoters include GAL1, GAL7 and GAL5 and metallothionein promoters, such as CUP1, AOX1 or other Pichia or other yeast promoter. Expression vectors often include a selectable marker such as LEU2, TRP1, HIS3 and URA3 for selection and maintenance of the transformed DNA. Proteins expressed in yeast are often soluble. Co-expression with chaperonins such as Bip and protein disulfide isomerase can improve expression levels and solubility. Additionally, proteins expressed in yeast can be directed for secretion using secretion signal peptide fusions such as the yeast mating type alpha-factor secretion signal from Saccharomyces cerevisae and fusions with yeast cell surface proteins such as the Aga2p mating adhesion receptor or the Arxula adeninivorans glucoamylase. A protease cleavage site such as for the Kex-2 protease, can be engineered to remove the fused sequences from the expressed polypeptides as they exit the secretion pathway. Yeast also is capable of glycosylation at Asn-X-Ser/Thr motifs.

[0283] iii. Insect Cells

[0284] Insect cells, particularly using baculovirus expression, can be used to express the polypeptides and anti-HCV antibodies or antigen-binding fragments thereof provided herein. Insect cells express high levels of protein and are capable of most of the post-translational modifications used by higher eukaryotes. Baculovirus have a restrictive host range which improves the safety and reduces regulatory concerns of eukaryotic expression. Typical expression vectors use a promoter for high level expression such as the polyhedrin promoter of baculovirus. Commonly used baculovirus systems include the baculoviruses such as Autographa californica nuclear polyhedrosis virus (AcNPV), and the bombyx mori nuclear polyhedrosis virus (BmNPV) and an insect cell line such as SD derived from Spodoptera frugiperda, Pseudaletia unipuncta (A7S) and Danaus plexippus (DpN1). For high-level expression, the nucleotide sequence of the molecule to be expressed is fused immediately downstream of the polyhedrin initiation codon of the virus. Mammalian secretion signals are accurately processed in insect cells and can be used to secrete the expressed protein into the culture medium. In addition, the cell lines Pseudaletia unipuncta (A7S) and Danaus plexippus (DpN1) produce proteins with glycosylation patterns similar to mammalian cell systems.

[0285] An alternative expression system in insect cells is the use of stably transformed cells. Cell lines such as the Schnieder 2 (S2) and Kc cells (Drosophila melanogaster) and C7 cells (Aedes albopictus) can be used for expression. The Drosophila metallothionein promoter can be used to induce high levels of expression in the presence of heavy metal induction with cadmium or copper. Expression vectors are typically maintained by the use of selectable markers such as neomycin and hygromycin.

[0286] iv. Mammalian Cells

[0287] Mammalian expression systems can be used to express the polypeptides and anti-HCV antibodies or antigen-binding fragments thereof provided herein. Expression constructs can be transferred to mammalian cells by viral infection, such as, but not limited to adenovirus or vaccinia virus, or by direct DNA transfer such as liposomes, calcium phosphate, DEAE-dextran and by physical means, such as electroporation and microinjection. Expression vectors for mammalian cells typically include an mRNA cap site, a TATA box, a translational initiation sequence (Kozak consensus sequence) and polyadenylation elements. Such vectors often include transcriptional promoter-enhancers for high-level expression, for example the SV40 promoter-enhancer, the human cytomegalovirus (CMV) promoter and the long terminal repeat of Rous sarcoma virus. These promoter-enhancers are active in many cell types. Tissue and cell type promoters and enhancer regions also can be used for expression. Exemplary promoter/enhancer regions include, but are not limited to, those from genes such as elastase I, insulin, immunoglobulin, mouse mammary tumor virus, albumin, alpha fetoprotein, alpha 1 antitrypsin, beta globin, myelin basic protein, myosin light chain 2, and gonadotropic releasing hormone gene control. Selectable markers can be used to select for and maintain cells with the expression construct. Examples of selectable marker genes include, but are not limited to, hygromycin B phosphotransferase, adenosine deaminase, xanthine-guanine phosphoribosyl transferase, aminoglycoside phosphotransferase, dihydrofolate reductase and thymidine kinase. Fusion with cell surface signaling molecules such as TCR-ξ and Fc_{ε}RI-γ can direct expression of the proteins in an active state on the cell surface.

[0288] Many cell lines are available for mammalian expression including mouse, rat human, monkey, chicken and hamster cells. Exemplary cell lines include, but are not limited to, CHO, Huh-7, Balb/3T3, 293, BHK, HeLa, MDCK, MT2, mouse NS0 (nonsecreting) and other myeloma cell lines, hybridoma and heterohybridoma cell lines, lymphocytes, fibroblasts, Sp2/0, COS, NIH3T3, HEK293, W138, BT483, HS578T, HTB2, BT20, T47D, 293S, 2B8, and HKB cells. Cell lines also are available adapted to serum-free media which facilitates purification of secreted proteins from the cell culture media. One such example is the serum free EBNA-1 cell line (Pham et al. (2003) Biotechnol. Bioeng. 84:332-42.)

[0289] v. Plants

[0290] Transgenic plant cells and plants can be used to express polypeptides such as any described herein. Expression constructs are typically transferred to plants using direct DNA transfer such as microprojectile bombardment and PEG-mediated transfer into protoplasts, and with agrobacterium-mediated transformation. Expression vectors can include promoter and enhancer sequences, transcriptional termination elements and translational control elements. Expression vectors and transformation techniques are usually divided between dicot hosts, such as Arabidopsis and tobacco, and monocot hosts, such as corn and rice. Examples of plant promoters used for expression include the cauliflower mosaic virus promoter, the nopaline syntase promoter, the ribose bisphosphate carboxylase promoter and the ubiquitin and UBQ3 promoters. Selectable markers such as hygromycin, phosphomannose isomerase and neomycin phosphotransferase are often used to facilitate selection and maintenance of transformed cells. Transformed plant cells can be maintained in culture as cells, aggregates (callus tissue) or regenerated into whole plants. Transgenic plant cells also can include algae engineered to produce proteases or modified proteases (see for example, Mayfield et al. (2003) PNAS 100:438-442). Because plants have different glycosylation patterns than mammalian cells, this can influence the choice of protein produced in these hosts.

[0291] d. Purification

[0292] Methods for purification of polypeptides, including the anti-HCV antibodies or antigen-binding fragments thereof provided, from host cells will depend on the chosen host cells and expression systems. For secreted molecules, proteins generally are purified from the culture media after removing the cells. For intracellular expression, cells can be lysed and the proteins purified from the extract. In one example, polypeptides are isolated from the host cells by centrifugation and cell lysis (e.g. by repeated freeze-thaw in a dry ice/ethanol bath), followed by centrifugation and retention of the supernatant containing the polypeptides. When transgenic organisms such as transgenic plants and animals are used for expression, tissues or organs can be used as starting material to make a lysed cell extract. Additionally, transgenic animal production can include the production of polypeptides in milk or eggs, which can be collected, and if necessary the proteins can be extracted and further purified using standard methods in the art.

[0293] Proteins, such as the anti-HCV antibodies or antigen-binding fragments thereof provided, can be purified, for example, from lysed cell extracts, using standard protein purification techniques known in the art including but not limited to, SDS-PAGE, size fraction and size exclusion chromatography, ammonium sulfate precipitation and ionic exchange chromatography, such as anion exchange. Affinity purification techniques also can be utilized to improve the efficiency and purity of the preparations. For example, antibodies, receptors and other molecules that bind proteases can be used in affinity purification. Expression constructs also can be engineered to add an affinity tag to a protein such as a myc epitope, GST fusion or His₆ and affinity purified with myc antibody, glutathione resin and Ni-resin, respectively. Purity can be assessed by any method known in the art including gel electrophoresis and staining and spectrophotometric techniques.

[0294] The isolated polypeptides then can be analyzed, for example, by separation on a gel (e.g. SDS-Page gel), size fractionation (e.g. separation on a Sephacryl™ S-200 HiPrep™ 16×60 size exclusion column (Amersham from GE Healthcare Life Sciences, Piscataway, N.J.). Isolated polypeptides also can be analyzed in binding assays, typically binding assays using a binding partner bound to a solid support, for example, to a plate (e.g. ELISA-based binding assays) or a bead, to determine their ability to bind desired binding partners. The binding assays described in the sections below, which are used to assess binding of precipitated phage displaying the polypeptides, also can be used to assess polypeptides isolated directly from host cell lysates. For example, binding assays can be carried out to determine whether antibody polypeptides bind to one or more antigens, for example, by coating the antigen on a solid support, such as a well of an assay plate and incubating the isolated polypeptides on the solid support, followed by washing and detection with secondary reagents, e.g. enzyme-labeled antibodies and substrates.

[0295] e. Additional Methods for Producing Antibodies

[0296] Additional methods can be used to produce anti-HCV antibodies. For example, antibodies can be obtained from the blood of a mammal that has been immunized with the E2 glycoprotein or the E1E2 complex of HCV. E2 glycoprotein or E1E2 complex can be obtained using conventional methods. See, for example, Lesniewski et al., J. Med. Virol. 45, 415-422 (1995); Chan-Fook et al., Virology 273, 60-66 (2000); Heile et al., J. Virol. 74: 6885-92 (2000); U.S. Pat. No. 6,274,148; and U.S. Pat. No. 5,667,992. The mammal can be for example, a rabbit, goat, or mouse. At the appropriate time after immunization, antibody molecules can be isolated from the mammal, e.g. from the blood or other fluid of the mammal, and further purified using standard techniques that include, without limitation, precipitation using ammonium sulfate, gel filtration chromatography, ion exchange chromatography or affinity chromatography using protein A. Antibodies that bind to HCV-specific antigens, e.g. antigenic epitopes on E2, can be identified using ELISA. Antibodies that bind to epitopes on the E1E2 complex, but do not bind to E2 epitopes can be identified by a masking technique as described herein.

[0297] Polypeptides and antibodies also can be obtained using various methods. Non-limiting examples include: (1) the generation of a polypeptide or antibody from an antibody-producing cell of a mammal that has been immunized or infected with HCV using single human B cell RT-PCR and expression vector cloning; (2) isolation from immortalized antibody-secreting B cells; and (3) isolation from an antibody-producing hybridoma generated by fusion of an antibody-producing cell with a myeloma cell. These techniques are known in the art. See, for example, Kohler & Milstein, Nature 256:495-97 (1975); Kozbor et al. Immunol Today 4: 72 (1983); Tiller et al., J Immunol Methods 329:112-124 (2008) and Traggiai et al., Nat Med 10:871-875 (2004).

[0298] Polypeptides or antibodies also can be prepared using other methods known in the art, such as, for example, screening of a recombinant combinatorial immunoglobulin library such as an antibody phage display library using antigenic epitope of the E2 glycoprotein or the E1E2 complex of HCV. See, for example, Barbas, C. F. et al., PHAGE DISPLAY—A LABORATORY MANUAL (2001) Cold Spring Harbor, New York: Cold Spring Harbor Laboratory Press; and Kontermann & Dubel, ANTIBODY ENGINEERING (2001) Berlin, Heidelberg: Springer-Verlag.

[0299] Nucleic acids encoding polypeptides, including antibodies and fragments thereof, can be derived from a human patient chronically infected with HCV by generating an expression library using the RNA of the patient's B cells or plasma cells and then screening for antibody-coding sequences. Alternatively, nucleic acids encoding polypeptides, including antibodies and fragments thereof, may be obtained from the cells of a non-human mammal immunized with the E2 glycoprotein or the E1E2 complex as an antigen, or antigenic epitopes of these proteins. See, for example, in Antibodies, A Laboratory Manual by Harlow and Lane, Cold Spring Harbor Laboratory Press, Cold Spring Harbor, N.Y., 1988, and in Molecular Cloning, A Laboratory Manual by Sambrook, et al., Cold Spring Harbor Laboratory Press, Cold Spring Harbor, N.Y. 1989, the disclosures of which are incorporated herein by reference.

[0300] Briefly, immune cells sensitized to the specified antigen such as mononuclear cells from the bone marrow of a patient infected with HCV or spleen cells harvested from a non-human mammalian host can be used. The mononuclear cells are processed according to the phage display technology described by Barbas et al. Proc. Natl. Acad. Sci., USA 88, 7978-7982 (1991); and in U.S. Pat. Nos. 5,580,717; 5,972,656; 6,113,898; and 6,140,470. The disclosures of these documents are incorporated herein by reference. Total RNA or RNA that has been processed to obtain the poly A-RNA is isolated from cells. After hybridization of an oligo-d(T) primer, the RNA (mRNA) is reverse transcribed to yield the corresponding cDNA. This cDNA is used to isolate nucleic acids encoding polypeptides. The cDNA can be amplified by polymerase chain reaction (PCR) to obtain nucleic acids encoding polypeptides. Selected primers can be used in PCR to isolate nucleic acids encoding polypeptide fragments such as V_{H}, V_{L}, as well as the constant regions.

[0301] The cDNA or PCR products can be inserted into a vector, such as a bacteriophage, a phagemid or a plasmid through use of recombinant DNA techniques well-known in the art. See Sambrook et al. (1989). The vectors containing the cDNA or PCR products can be introduced into bacteria to produce an expression library, the members of which express a polypeptide encoded by the cDNA or PCR product such as a full-length light or heavy chain polypeptide, a single variable chain polypeptide, or a single chain Fab or Fab′.

[0302] The procedure also allows for the production of a polypeptide that is fused to a phage coat protein. The library of recombinant phage can be panned as described in the foregoing references and patents to select members of the library that express an antibody that binds specifically to the E2 glycoprotein or the E1E2 complex. The panning may be accomplished by combining the library with an immobilized antigen, removing the phage not bound, and then removing the bound phage.

[0303] Host bacterial cells such as E. coli or other suitable bacteria can be transfected with members of the phage library that express an antibody that binds to the immobilized antigen. The resulting bacterial cells can be separated into colonies by serial dilution and plating so that each colony isolated expresses a unique antibody. The phage also can carry a selection marker such as an antibiotic resistance gene so that host bacterial cells expressing an antibody can be identified by cultivating the host cell library in culture medium containing the antibiotic. Cultures from single colonies can be examined by a binding assay using the E2 protein or E1-E2 complex to identify those expressing an antibody having particular immunoreactivity.

[0304] Following selection of bacterial colonies that express an antibody having specific immunoreactivities, the nucleic acid sequences coding for the CDR's, framework regions, or variable or constant regions in the selected cultures can be determined using known nucleotide sequencing procedures. Thus, nucleic acids encoding CDR sequences, framework sequences and/or constant regions of an polypeptide can be obtained from a phage library.

[0305] The following detailed procedure provides further explanation for production of the polypeptides provided herein.

[0306] PCR amplification of Fd and κ regions from the mRNA of the source mononuclear cells may be performed as described by Sastry et al., Proc. Natl. Acad. Sci U.S.A., 86, 5728 (1989) and Barbas et al., PHAGE DISPLAY: A LABORATORY MANUAL. New York: Cold Spring Harbor Laboratory Press (2001). The PCR amplification is performed with cDNA obtained by the reverse transcription of the mRNA with primer specific for amplification of heavy chain sequences or light chain sequences.

[0307] The PCR amplification of messenger RNA (mRNA) isolated from the mononuclear cells with oligonucleotides that incorporate restriction sites into the ends of the amplified product may be used to clone and express heavy chain sequences (e.g., the amplification of the Fd fragment) and κ light chain sequences from B cells. The oligonucleotide primers, which are analogous to those that have been successfully used for amplification of V_{H} and V_{L} sequences (see Sastry et al., Proc. Natl. Acad. Sci. U.S.A., 86, 5728 (1989) and Barbas et al., PHAGE DISPLAY: A LABORATORY MANUAL. New York: Cold Spring Harbor Laboratory Press (2001)), may be used for these amplifications. Restriction endonuclease recognition sequences are typically incorporated into these primers to allow for the cloning of the amplified fragment into a suitable vector (i.e. a phagemid or a λ phage) in a predetermined reading frame for expression.

[0308] Phage assembly proceeds via an extrusion-like process through the bacterial membrane. For example filamentous phage M13 may be used for this process. This phage has a 406-residue minor phage coat protein (cpIII) which is expressed before extrusion and which accumulates on the inner membrane facing into the periplasm of E. coli. The two functional properties of cpIII, infectivity and normal (nonpolyphage) morphogenesis have been assigned to roughly the first and second half of the gene. The N-terminal domain of cpIII binds to the F′ pili, allowing for infection of E. coli, whereas the membrane-bound C-terminal domain, P198-S406, serves the morphogenic role of capping the trailing end of the filament according to the vectorial polymerization model.

[0309] A phagemid vector may be constructed to fuse the antibody fragment chain such as an Fab, Fab′ or preferably an Fd chain with the C-terminal domain of cpIII (see Barbas et al., Proc. Natl. Acad. Sci. USA, 88, 7978 (1991)). A flexible five-amino acid tether (GGGGS), which lacks an ordered secondary structure, may be juxtaposed between the expressed fragment chain and cpIII domains to minimize interaction. The phagemid vector also can be constructed to include a nucleotide coding for the light chain of a Fab fragment. The cpIII/Fd fragment fusion protein and the light chain protein may be placed under control of separate lac promoter/operator sequences and directed to the periplasmic space by pelB leader sequences for functional assembly on the membrane. Inclusion of the phage F1 intergenic region in the vector allows for packaging of single-stranded phagemid with the aid of helper phage. The use of helper phage superinfection may result in expression of two forms of cpIII. Consequently, normal phage morphogenesis may be perturbed by competition between the cpIII/Fd fragment fusion protein and the native cpIII of the helper phage for incorporation into the virion. The resulting packaged phagemid may carry native cpIII, which is necessary for infection, and the fusion protein including the Fab fragment, which may be displayed for interaction with an antigen and used for selection. Fusion at the C-terminal domain of cpIII is necessitated by the phagemid approach because fusion with the infective N-terminal domain would render the host cell resistant to infection. The result is a phage displaying antibody combining sites (“Phabs”). The antibody combining sites, such as Fab fragments, are displayed on the phage coat. This technique may be used to produce Phabs which display recombinantly produced Fab fragments, such as recombinantly produced Fab fragments that immunoreact with an antigen, on the phage coat of a filamentous phage such as M13.

[0310] A phagemid vector (i.e. pComb 3 or pComb3H) which allows the display of antibody Fab fragments on the surface of filamentous phage, has been described (see Barbas et al., Proc. Natl. Acad. Sci. USA, 88, 7978 (1991). Xho I and Spe I sites for cloning PCR-amplified heavy-chain Fd sequences are included in pComb 3 and pComb3H. Sac I and Xba I sites are also provided for cloning PCR-amplified antibody light chains. These cloning sites are compatible with known mouse and human PCR primers (see, e.g., Huse et al., Science, 246, 1275-1281 (1989)). The nucleotide sequences of the pelB leader sequences are recruited from the λ HC2 and λ LC2 constructs described in Huse et al, ibid, with reading frames maintained. Digestion of pComb 3 and pComb3H, encoding a selected Fab, with Spe I and Nhe I permit the removal of the gene III fragment, which includes the nucleotide sequences coding for the antibody Fab fragments. Because Spe I and Nhe I produce compatible cohesive ends, the digested vector also can be religated to yield a phagemid that produces soluble Fab.

[0311] Fabs may be produced by overnight infection of phagemid containing cells (e.g., infected E. coli XL-1 Blue) yielding typical titers of 10¹¹ cfu/ml. By using phagemids encoding different antibiotic resistances, ratios of clonally distinct phage may easily be determined by titering on selective plates. In single-pass enrichment experiments, clonally mixed phage may be incubated with an antigen-coated plate. Nonspecific phage will be removed by washing, and bound phage may then be eluted with acid and isolated.

[0312] The polypeptides provided herein, including antibodies and fragments thereof, can be used to detect the presence, or determine the amount, of HCV in a biological sample as described herein. These polypeptides also can be used for a prophylactic purpose to prevent infection of a mammal or mammalian cell by HCV.

[0313] 4. Assessing Anti-HCV Antibodies

[0314] The anti-HCV antibodies or antigen-binding fragments thereof provided herein can be characterized in a variety of ways well-known to one of skill in the art. For example, the anti-HCV antibodies or antigen-binding fragments thereof provided herein can be assayed for the ability to immunospecifically bind to E1, E2 or E1E2 complex of HCV. Such assays can be performed, for example, in solution (e.g., Houghten (1992) Bio/Techniques 13:412-421), on beads (Lam (1991) Nature 354:82-84), on chips (Fodor (1993) Nature 364:555-556), on bacteria (U.S. Pat. No. 5,223,409), on spores (U.S. Pat. Nos. 5,571,698; 5,403,484; and 5,223,409), on plasmids (Cull et al. (1992) Proc. Natl. Acad. Sci. USA 89:1865-1869) or on phage (Scott and Smith (1990) Science 249:386-390; Devlin (1990) Science 249:404-406; Cwirla et al. (1990) Proc. Natl. Acad. Sci. USA 87:6378-6382; and Felici (1991) J. Mol. Biol. 222:301-310). Antibodies or antigen-binding fragments thereof that have been identified to selectively bind to an HCV antigen or a fragment thereof also can be assayed for their specificity and affinity for a HCV antigen. In addition, in vitro assays and in vivo animal models using the anti-HCV antibodies or antigen-binding fragments thereof provided herein can be employed for measuring the level of HCV neutralization effected by contact or administration of the anti-HCV antibodies or antigen-binding fragments thereof.

[0315] a. Binding Assays

[0316] The anti-HCV antibodies or antigen-binding fragments thereof provided herein can be assessed for their ability to bind a selected target (e.g., HCV virus, E2 polypeptide, or E1E2 complex) and the specificity for such targets by any method known to one of skill in the art. Exemplary assays are provided in the Examples and described herein below. Binding assays can be performed in solution, suspension or on a solid support. For example, target antigens can be immobilized to a solid support (e.g. a carbon or plastic surface, a tissue culture dish or chip) and contacted with antibody or antigen-binding fragment thereof. Unbound antibody or target protein can be washed away and bound complexes can then be detected. Binding assays can be performed under conditions to reduce nonspecific binding, such as by using a high ionic strength buffer (e.g. 0.3-0.4 M NaCl) with nonionic detergent (e.g. 0.1% Triton X-100 or Tween 20) and/or blocking proteins (e.g. bovine serum albumin or gelatin). Negative controls also can be included in such assays as a measure of background binding. Binding affinities can be determined using Scatchard analysis (Munson et al., Anal. Biochem., 107:220 (1980)), surface plasmon resonance, isothermal calorimetry, or other methods known to one of skill in the art.

[0317] Exemplary immunoassays that can be used to analyze immunospecific binding and cross-reactivity include, but are not limited to, competitive and non-competitive assay systems using techniques such as, but not limited to, western blots, radioimmunoassays, ELISA (enzyme linked immunosorbent assay), Meso Scale Discovery (MSD, Gaithersburg, Md.), “sandwich” immunoassays, immunoprecipitation assays, ELISPOT, precipitin reactions, gel diffusion precipitin reactions, immunodiffusion assays, agglutination assays, complement-fixation assays, immunoradiometric assays, fluorescent immunoassays, protein A immunoassays. Such assays are routine and well known in the art (see, e.g., Ausubel et al, eds, 1994, Current Protocols in Molecular Biology, Vol. 1, John Wiley & Sons, Inc., New York, which is incorporated by reference herein in its entirety). Other assay formats include liposome immunoassays (LIA), which use liposomes designed to bind specific molecules (e.g., antibodies) and release encapsulated reagents or markers. The released chemicals are then detected according to standard techniques (see Monroe et al., (1986) Amer. Clin. Prod. Rev. 5:34-41). Exemplary immunoassays not intended by way of limitation are described briefly below.

[0318] Immunoprecipitation protocols generally comprise lysing a population of cells in a lysis buffer such as RIPA buffer (1% NP-40 or Triton X-100, 1% sodium deoxycholate, 0.1% SDS, 0.15 M NaCl, 0.01 M sodium phosphate at pH 7.2, 1% Trasylol) supplemented with protein phosphatase and/or protease inhibitors (e.g., EDTA, PMSF, aprotinin, sodium vanadate), adding the antibody or antigen-binding fragment thereof of interest to the cell lysate, incubating for a period of time (e.g., 1 to 4 hours) at 40° C., adding protein A and/or protein G sepharose beads to the cell lysate, incubating for about an hour or more at 40° C., washing the beads in lysis buffer and resuspending the beads in SDS/sample buffer. The ability of the antibody or antigen-binding fragment thereof of interest to immunoprecipitate a particular antigen can be assessed by, e.g., western blot analysis. One of skill in the art is knowledgeable as to the parameters that can be modified to increase the binding of the antibody or antigen-binding fragment thereof to an antigen and decrease the background (e.g., pre-clearing the cell lysate with sepharose beads). For further discussion regarding immunoprecipitation protocols see, e.g., Ausubel et al., eds, 1994, Current Protocols in Molecular Biology, Vol. 1, John Wiley & Sons, Inc., New York at 10.16.1.

[0319] Western blot analysis generally comprises preparing protein samples, electrophoresis of the protein samples in a polyacrylamide gel (e.g., 8%-20% SDS-PAGE depending on the molecular weight of the antigen), transferring the protein sample from the polyacrylamide gel to a membrane such as nitrocellulose, PVDF or nylon, blocking the membrane in blocking solution (e.g., PBS with 3% BSA or non-fat milk), washing the membrane in washing buffer (e.g., PBS-Tween 20), blocking the membrane with primary antibody or antigen-binding fragment thereof (i.e. the antibody or antigen-binding fragment thereof of interest) diluted in blocking buffer, washing the membrane in washing buffer, blocking the membrane with a secondary antibody (which recognizes the primary antibody, e.g., an anti-human antibody) conjugated to an enzymatic substrate (e.g., horseradish peroxidase or alkaline phosphatase) or radioactive molecule (e.g., ³²P or ¹²⁵I) diluted in blocking buffer, washing the membrane in wash buffer, and detecting the presence of the antigen. One of skill in the art is knowledgeable as to the parameters that can be modified to increase the signal detected and to reduce the background noise. For further discussion regarding western blot protocols see, e.g., Ausubel et al, eds, 1994, Current Protocols in Molecular Biology, Vol. 1, John Wiley & Sons, Inc., New York at 10.8.1.

[0320] ELISAs comprise preparing antigen, coating the well of a 96 well microtiter plate with the antigen, adding the antibody or antigen-binding fragment thereof of interest conjugated to a detectable compound such as an enzymatic substrate (e.g., horseradish peroxidase or alkaline phosphatase) to the well and incubating for a period of time, and detecting the presence of the antigen. In ELISAs, the antibody or antigen-binding fragment thereof of interest does not have to be conjugated to a detectable compound; instead, a second antibody (which recognizes the antibody of interest) conjugated to a detectable compound can be added to the well. Further, instead of coating the well with the antigen, the antibody can be coated to the well. In this case, a second antibody conjugated to a detectable compound can be added following the addition of the antigen of interest to the coated well. One of skill in the art is knowledgeable as to the parameters that can be modified to increase the signal detected as well as other variations of ELISAs known in the art. For further discussion regarding ELISAs see, e.g., Ausubel et al, eds, 1994, Current Protocols in Molecular Biology, Vol. 1, John Wiley & Sons, Inc., New York at 11.2.1.

[0321] The binding affinity of an antibody or antigen-binding fragment thereof to an antigen and the off-rate of an antibody-antigen interaction can be determined, for example, by competitive binding assays. One example of a competitive binding assay is a radioimmunoassay comprising the incubation of labeled antigen (e.g., ³H or ¹²⁵I) with the antibody or antigen-binding fragment thereof of interest in the presence of increasing amounts of unlabeled antigen, and the detection of the antibody or antigen-binding fragment thereof bound to the labeled antigen. The affinity of an anti-HCV antibody or antigen-binding fragment thereof provided herein for a HCV antigen and the binding off-rates can be determined from the data by Scatchard plot analysis. Competition with a second antibody can also be determined using radioimmunoassay or assays with other labels for the antibodies, such as biotin (see, e.g., Example 1). In this case, a HCV antigen, such as E1E2 complex, is incubated with an anti-HCV antibody or antigen-binding fragment thereof provided herein conjugated to a labeled compound (e.g., ³H, ¹²⁵I or biotin) in the presence of an unlabeled second antibody. The amount of labeled antibody that is bound to the antigen is then assessed and compared to the binding in the absence of the blocking antibody. Competition is determined by the percentage change in binding signals in the presence of the unlabeled blocking antibody compared to the absence of the blocking antibody. Such competition assays can be used to assess whether two antibodies bind to the same epitope. Typically, competition of 70% or more (i.e. the amount of labeled antibody bound to the antigen in the presence of the unlabeled blocking antibody is 30% or less of the amount of the biotinylated antibody bound to the antigen in the absence of the antibody), such as 70%, 71%, 72%, 73%, 74%, 75%, 80%, 85%, 90%, 95% or more, is indicative that the antibodies bind to the same epitope.

[0322] In some examples, surface plasmon resonance (e.g., BiaCore 2000, Biacore AB, Upsala, Sweden and GE Healthcare Life Sciences; Malmqvist (2000) Biochem. Soc. Trans. 27:335) kinetic analysis can be used to determine the binding on and off rates of antibodies or antigen-binding fragments thereof to a HCV antigen. Surface plasmon resonance kinetic analysis comprises analyzing the binding and dissociation of a HCV antigen from chips with immobilized antibodies or fragments thereof on their surface.

[0323] b. In Vitro Assays for Analyzing Virus Neutralization Effects of Antibodies

[0324] The anti-HCV antibodies or antigen-binding fragments thereof provided herein can be analyzed using neutralization assays. Exemplary neutralization assays for the analysis of anti-HCV antibodies include those that employ HCVcc (cell culture derived HCV) or HCVpp (HCV pseudparticles). HCV typically does not replicate in vitro. However, an HCV genotype 2a clone, designated JFH-1, has been found to replicate in Huh-7 cells (Kato et al., (2003) Gastroenterology 125:1808-1817). Chimeric clones containing the 5′- and 3′-NCRs, as well as the NS3-5B region of JFH-1 and the C-NS2 region of a different genotype 2a isolate designated J6 have even greater replication efficiency (Lindenbach et al. (2005) Science 309, 623-626). Neutralization assays using HCV pseudoparticles (HCVpp), such as those described in Example 1, below, also can be used to characterize the anti-HCV antibodies provided herein. HCVpp are formed by incorporation of the full-length hepatitis C virus glycoproteins E1 and E2 onto lenti- or retroviral core particles. These particles are able to infect and replicate in, for example, 293T cells and Huh-7 cells.

[0325] c. In Vivo Animal Models

[0326] In vivo studies using animal models can be performed to assess the efficacy of the anti-HCV antibodies or antigen-binding fragments thereof provided herein. In vivo studies using animal models can be performed to assess the ability of the antibodies to prevent or treat HCV infection, and the toxicity of administration of such antibodies or antigen-binding fragments. There are limited animal models for HCV. These include the chimpanzee and the chimeric mouse model. The chimeric mouse model utilizes SCID-beige/Alb-uPA mice, which are immunodeficient SCID mice carrying a urokinase plasminogen activator (uPA) transgene under the control of the albumin promoter (Mercer et al. (2001) Nature Med. 7:927-933). Expression of the uPA transgene in the mouse liver causes a depletion of the mouse hepatocytes. Transplantation of normal human hepatocytes into SCID-beige/Alb-uPA mice results in animals with chimeric human livers which can then be infected with HCV. This model can be used to assess the ability of the anti-HCV antibodies or antigen-binding fragments thereof provided herein to prevent or treat HCV infection, as demonstrated in Examples 1 and 2. The half-life of the antibodies also can be assessed.

[0327] 5. Uses for Anti-HCV Polypeptides and Antibodies

[0328] The polypeptides provided herein, including antibodies and fragments thereof, can be used to detect the presence of HCV in a sample from a source that has been exposed to HCV and is susceptible to HCV infection or capable of sustaining HCV replication. The polypeptide or antibody can be Tabled with a detectable molecule, which can be an enzyme such as alkaline phosphatase, acetylcholinesterase, β-galactosidase or horseradish peroxidase; a prosthetic group such as streptavidin, biotin, or avidin; a fluorescent group such as dansyl chloride, dichlorotriazinylamine, dichlorotriazinylamine fluorescein, fluorescein, fluorescein isothiocyanate, phycoerythrin, rhodamine, umbelliferone; a luminescent group such as luminal; a bioluminescent group such as aequorin, luciferase, and luciferin; or a radioisotope such as ³H, ¹²⁵I, ¹³¹I, ³⁵S.

[0329] When combined with a sample from a source that has been exposed to HCV, the presence of HCV can be detected by detecting the formation of a complex between the polypeptide or antibody and HCV particles.

[0330] The polypeptides provided herein, including antibodies and fragments thereof, also can be used to prevent or treat infection by an HCV or to prevent or reduce HCV replication. For example, the polypeptides provided herein, including antibodies and fragments thereof, can be administered to a subject that has been exposed to the virus or is likely exposed to the virus, to prevent new or recurring HCV infection and its associated symptoms and/or complications, or prevent or reduce HCV replication. This includes administration to a clinically symptomatic individual to treat new or recurring HCV infection. The polypeptides provided herein, including antibodies and fragments thereof, can be used to prevent or treat infection of a mammalian cell, such as a human cell. It can be used to prevent or treat acute or chronic HCV infection, or prevent or reduce HCV replication, in a mammal such as a human.

[0331] The degree of HCV infection or replication can be determined by determining the amount of HCV particles or the amount of HCV RNA in a sample from the mammal using methods described herein.

[0332] A subject, such as a mammal, for example a human, that can benefit from the polypeptides provided herein, including antibodies and fragments thereof, includes one who is likely to be or has been exposed to HCV. Such a mammal includes, without limitation, someone present in an area where HCV is prevalent or commonly transmitted, e.g., Africa, Southeast Asia, China, South Asia, Australia, India, the United States, Russia, as well as Central and South American countries. A subject that is likely to be or has been exposed to HCV also includes a recipient of donated body tissues or fluids including, for example, a recipient of blood or one or more of its components such as plasma, platelets, or stem cells and an organ or cell transplant recipient. A subject, such as a mammal, including a human, who is likely to be or has been exposed to HCV also can include medical, clinical or dental personnel handling body tissues and fluids. A mammal who has been exposed to HCV includes, without limitation, someone who has had contact with the body tissue or fluid, e.g. blood, of an infected person or otherwise have come in contact with HCV. A mammal that can benefit from a polypeptide of the invention includes a liver transplantee. Thus, the polypeptides provided herein, including antibodies and fragments thereof, can be used to prevent recurring HCV infection, for example, in an individual who has received a liver transplant.

[0333] The polypeptides provided herein, including antibodies and fragments thereof, can be used to prevent or treat HCV infection, or prevent or reduce HCV replication, as well as treat the associated disease condition or clinical symptoms. Thus, the polypeptides provided herein, including antibodies and fragments thereof, can be used to prevent or reduce transmission, to prevent or treat disease progression, and to prevent or reduce HCV replication or reduce viral load. Treatment with the polypeptide includes the alleviation or diminishment of at least one symptom typically associated with the infection. The treatment also includes alleviation or diminishment of more than one symptom. Ideally, the treatment cures, e.g., substantially inhibits viral infection and/or eliminates the symptoms associated with the infection.

[0334] Symptoms of HCV exposure or infection include, without limitation, inflammation of the liver, decreased appetite, fatigue, abdominal pain, jaundice, flu-like symptoms, itching, muscle pain, joint pain, intermittent low-grade fevers, sleep disturbances, nausea, dyspepsia, cognitive changes, depression, headaches and mood changes.

[0335] Diagnostic and screening techniques useful for identification of patients afflicted with HCV include any that identify antibody-antigen binding. HCV infection can be diagnosed by detecting antibodies to the virus, detecting liver inflammation by biopsy, liver cirrhosis, portal hypertension, thyroiditis, cryoglobulinemia and glomerulonephritis. In addition, diagnosis of exposure or infection or identification of one who is at risk of exposure to HCV could be based on medical history, abnormal liver enzymes or liver function tests during routine blood testing. Generally, infection can be diagnosed using polymerase chain reaction (PCR) for detecting viral nucleic acids, enzyme linked immunosorbent assay (ELISA) for detecting viral antigens or anti-viral antibodies, and immunofluorescence for detecting viral antigens. For example, the polypeptides or antibodies provided herein can be combined with an appropriate sample from the patient to produce a complex. The complex in turn can be detected with a marker reagent for binding with such a complex. Typical marker reagents include secondary antibodies selective for the complex, secondary antibodies selective for certain epitopes of the polypeptide or antibody or a label attached to the polypeptide or antibody itself. In particular, radioimmunoassay (RIA), radioallergosorbent test (RAST), radioimmunosorbent test (RIST), immunoradiometric assay (IRMA), Farr assay, fluorescence immunoassay (FIA), sandwich assay, enzyme linked immunosorbent assay (ELISA), northern or southern blot analysis, and color activation assay may be used following protocols well known for these assays. See for example Immunology, An Illustrated Outline by David Male, C.V. Mosby Company, St Louis, Mo., 1986 and the Cold Spring Harbor Laboratory Manuals cited above. Labels including radioactive labels, chemical labels, fluorescent labels, luciferase and the like also can be directly attached to the polypeptide according to the techniques described in U.S. patent No. (BN patent cite), the disclosure of which is incorporated herein by reference.

[0336] Methods of preventing or treating acute or recurring HCV infection include contacting the cell with an effective amount of a polypeptide or antibody or administering to a mammal such as a human a therapeutically effective amount of a polypeptide or antibody of the present invention. Methods of inactivating the virus include contacting the virus with an effective amount of the polypeptide or antibody provided herein.

[0337] The polypeptides provided herein, including antibodies and fragments thereof, can be administered in a variety of ways. Routes of administration include, without limitation, oral, parenteral (including subcutaneous, intravenous, intramuscular and intraperitoneal), rectal, vaginal, dermal, transdermal (topical), transmucosal, intrathoracic, intrapulmonary and intranasal (respiratory) routes. The means of administration may be by injection, using a pump or any other appropriate mechanism.

[0338] The polypeptides provided herein, including antibodies and fragments thereof, can be administered in a single dose, in multiple doses, in a continuous or intermittent manner, depending, for example, upon the recipient's physiological condition, whether the purpose of the administration is therapeutic or prophylactic, and other factors known to skilled practitioners. The administration of the polypeptides can be essentially continuous over a pre-selected period of time or may be in a series of spaced doses. For example, to prevent recurrent HCV infection in a transplant patient, the polypeptides provided herein, including antibodies and fragments thereof, can be administered during the anhepatic phase, i.e. after removal of the liver and before transplant of a replacement liver, as well as after the transplant, e.g. daily, weekly, biweekly or monthly. Both local and systemic administrations are contemplated.

[0339] The dosage to be administered to a mammal may be any amount appropriate to reduce or prevent viral infection or to treat at least one symptom associated with the viral infection. Some factors that determine appropriate dosages are well known to those of ordinary skill in the art and may be addressed with routine experimentation. For example, determination of the physicochemical, toxicological and pharmacokinetic properties may be made using standard chemical and biological assays and through the use of mathematical modeling techniques known in the chemical, pharmacological and toxicological arts. The therapeutic utility and dosing regimen may be extrapolated from the results of such techniques and through the use of appropriate pharmacokinetic and/or pharmacodynamic models. Other factors will depend on individual patient parameters including age, physical condition, size, weight, the condition being treated, the severity of the condition, and any concurrent treatment. The dosage will also depend on the polypeptide or antibody chosen and whether prevention or treatment is to be achieved, and if the polypeptide or antibody is chemically modified. Such factors can be readily determined by the clinician employing viral infection models such as in vitro HCV infection system described herein, or other animal models or test systems that are available in the art.

[0340] The precise amount to be administered to a patient will be the responsibility of the attendant physician. The amount useful to establish treatment of HCV can be determined by diagnostic and therapeutic techniques well known to those of ordinary skill in the art. The dosage may be determined by titrating a sample of the patient's blood sera with the polypeptide or antibody to determine the end point beyond which no further immunocomplex is formed. Such titrations may be accomplished by the diagnostic techniques discussed below. Available dosages include administration of from about 1 to about 1 million effective units of antibody per day, wherein a unit is that amount of polypeptide, which will provide at least 1 microgram of antigen-polypeptide complex. Preferably, from about 10 to about 100,000 units of antibody per day can be administered.

[0341] To achieve the desired effect(s), one or more polypeptides provided herein, including antibodies and fragments thereof, can be administered as single or divided dosages, for example, of at least about 0.01 mg/kg to about 500, 750 or 1000 mg/kg, of at least about 0.01 mg/kg to about 300 to 500 mg/kg, at least about 0.1 mg/kg to about 100 to 300 mg/kg or at least about 1 mg/kg to about 50 to 100 mg/kg of body weight, although other dosages may provide beneficial results. For post-exposure prophylactic use, the one or more polypeptides or antibodies may be administered immediately, e.g. within 24 hours, after exposure to HCV. To prevent recurrent HCV infection, e.g. in a transplant recipient such as a liver transplant recipient, a polypeptide or antibody of the invention may be administered prior to and after transplantation. For example, the polypeptides, including antibodies, can be administered during the anhepatic phase, as well as during the post-operative phase. The polypeptide can be administered daily, biweekly or monthly after the transplant. The polypeptides provided herein, including antibodies and fragments thereof, can be administered daily for the first week after transplant, weekly for two, three or more weeks after the transplant and then monthly.

[0342] The absolute weight of a given polypeptide included in a unit dose can vary widely. For example, about 0.01 to about 2 g, or about 0.1 to about 500 mg, of at least one polypeptide, including an antibody, or a plurality of polypeptides, including a plurality of antibodies can be administered. Alternatively, the unit dosage can vary from about 0.01 g to about 50 g, from about 0.01 g to about 35 g, from about 0.1 g to about 25 g, from about 0.5 g to about 12 g, from about 0.5 g to about 8 g, from about 0.5 g to about 4 g, or from about 0.5 g to about 2 g.

[0343] The daily dose of the polypeptides provided herein, including antibodies and fragments thereof, can vary as well. Such daily dose can range, for example, from about 0.1 g/day to about 50 g/day, from about 0.1 g/day to about 25 g/day, from about 0.1 g/day to about 12 g/day, from about 0.5 g/day to about 8 g/day, from about 0.5 g/day to about 4 g/day, and from about 0.5 g/day to about 2 g/day.

[0344] The polypeptides provided herein, including antibodies and fragments thereof, can be used alone or in combination with a second medicament. The second medicament can include, but is not limited to, another polypeptide, such as an antibody, provided herein, another polypeptide, such as an antibody, described elsewhere, and a known antiviral agent such as, for example, an interferon-based therapeutic or another type of antiviral medicament such as ribavirin. For example, the anti-HCV antibodies provided herein can be administered in combination with anti-NS3 antibodies having a heavy chain containing the sequence of amino acids set forth in any of SEQ ID NOS: 67-71 and a light chain containing the sequence of amino acids set forth in any of SEQ ID NOS: 72-77, or a CDR and/or framework sequence set forth in any of SEQ ID NOS: 276-308 or 573-606, respectively. In some instances, the second medicament is an anticancer, antibacterial, or another antiviral agent. The antiviral agent may act at any step in the life cycle of the virus from initial attachment and entry to egress. Thus, the second antiviral agent may interfere with attachment, fusion, entry, trafficking, translation, viral polyprotein processing, viral genome replication, viral particle assembly, egress or budding. Stated another way, the antiviral agent may be an attachment inhibitor, entry inhibitor, a fusion inhibitor, a trafficking inhibitor, a replication inhibitor, a translation inhibitor, a protein processing inhibitor, an egress inhibitor, in essence an inhibitor of any viral function. The effective amount of the second medicament will follow the recommendations of the manufacturer of the second medicament, as well as the judgment of the attending physician, and will be guided by the protocols and administrative factors for amounts and dosing as indicated in the PHYSICIAN'S DESK REFERENCE.

[0345] To determine the effectiveness of any of the polypeptides, including antibodies or fragments thereof, provided herein, for inhibition and treatment of HCV infection, methods available in the art and those described herein can be used. The effectiveness of the method of treatment can be assessed by monitoring the patient for signs or symptoms of the viral infection as discussed above, as well as determining the presence and/or amount of viral particle or viral RNA present in the blood, e.g. the viral load, using methods known in the art. Viral infection or replication in the presence or absence of the polypeptide can be evaluated, for example, by determining intracellular viral RNA levels or the number of viral foci by immunoassays using antibody against viral proteins as described herein. A polypeptide, including an antibody, is effective for treatment and inhibition of HCV if it can inhibit or reduce viral infection or replication by any amount, for example, by 5%, 10%, 15%, 20%, 25%, 30%, 35%, 40%, 45%, 50%, 55%, 60%, 65%, 70%, 75%, 80%, 85%, 90%, 95% or more. For example, a polypeptide, including an antibody, is effective for treatment and inhibition of HCV if it can inhibit or reduce viral infection or replication by 2 fold or more than 2 fold, such as by 2-5 fold, 5-10 fold, or more than 10 fold.

[0346] The polypeptides provided herein, including antibodies and fragments thereof, can be used to increase the safety of blood and blood products, to increase the safety of clinical laboratory samples and to increase the safety of biological tissues as well as articles, devices, or instruments intended for preventative or therapeutic use. For example, a polypeptide, such as an antibody, can be added to blood or blood products such as plasma, platelets, and blood or marrow cells prior to use. The polypeptides provided herein, including antibodies and fragments thereof, can be combined with cells or tissues prior to use or administration. It can be coated on articles, devices or instruments such as, for example, valves, bags and stents.

[0347] 6. Pharmaceutical Compositions

[0348] Provided are pharmaceutical composition that includes at least one or more, including two, three, four, or more than four polypeptides, including antibodies, described above. In some examples, the composition includes a polypeptide, such as an antibody provided herein, in combination with another anti-HCV antibody that recognizes a different or non-overlapping HCV epitope. For example, a pharmaceutical composition can include an antibody that binds an epitope on the E1E2 complex and a second antibody that binds an epitope on the HCV E2 polypeptide. In some examples, the composition includes a cocktail of antibodies, e.g. at least two, three, four, five or more than five anti-HCV antibodies, at least two of which recognize different conformational neutralizing epitopes.

[0349] To prepare such a pharmaceutical composition, the polypeptide is obtained by, for example, expression in a host cell, and purified as necessary or desired and then lyophilized and stabilized. The polypeptide can then be adjusted to the appropriate concentration and then combined with other agent(s) or pharmaceutically acceptable carrier(s). A pharmaceutical formulation containing therapeutic amounts of one or more polypeptides, including antibodies, can be prepared by procedures known in the art using well-known and readily available ingredients. For example, one or more polypeptides can be formulated with common excipients, diluents, or carriers, and formed into tablets, capsules, solutions, suspensions, powders, aerosols and the like. Examples of excipients, diluents, and carriers that are suitable for such formulations include buffers, as well as fillers and extenders such as starch, cellulose, sugars, mannitol, and silicic derivatives. Binding agents also can be included such as carboxymethyl cellulose, hydroxymethylcellulose, hydroxypropyl methylcellulose and other cellulose derivatives, alginates, gelatin, and polyvinyl-pyrrolidone.

[0350] Moisturizing agents can be included such as glycerol, disintegrating agents such as calcium carbonate and sodium bicarbonate. Agents for retarding dissolution also can be included such as paraffin. Resorption accelerators such as quaternary ammonium compounds also can be included. Surface active agents such as cetyl alcohol and glycerol monostearate can be included. Adsorptive carriers such as kaolin and bentonite can be added. Lubricants such as talc, calcium and magnesium stearate, and solid polyethyl glycols also can be included. Preservatives also can be added. The compositions also can contain thickening agents such as cellulose and/or cellulose derivatives. They also can contain gums such as xanthan, guar or carbo gum or gum arabic, or alternatively polyethylene glycols, bentones and montmorillonites, and the like.

[0351] For oral administration, one or more polypeptides, including antibodies, provided herein can be present as a powder, a granular formulation, a solution, a suspension, an emulsion or in a natural or synthetic polymer or resin for ingestion of the active ingredients from a chewing gum. The polypeptide also can be presented as a bolus, electuary or paste. The formulations can, where appropriate, be conveniently presented in discrete unit dosage forms and can be prepared by any of the methods well known to the pharmaceutical arts including the step of mixing the therapeutic agent with liquid carriers, solid matrices, semi-solid carriers, finely divided solid carriers or combinations thereof, and then, if necessary, introducing or shaping the product into the desired delivery system. The total active ingredients in such formulations comprise from 0.1 to 99.9% by weight of the formulation.

[0352] The polypeptides, including antibodies, provided herein also can be formulated as elixirs or solutions for convenient oral administration or as solutions appropriate for parenteral administration, for instance by intramuscular, subcutaneous, intraperitoneal or intravenous routes. A pharmaceutical formulation containing one or more polypeptides also can take the form of an aqueous or anhydrous solution or dispersion, or alternatively the form of an emulsion or suspension or salve.

[0353] Thus, one or more polypeptides, including antibodies, can be formulated for parenteral administration (e.g., by injection, for example, bolus injection or continuous infusion) and may be presented in unit dose form in ampoules, pre-filled syringes, small volume infusion containers or in multi-dose containers. As noted above, preservatives can be added to help maintain the shelf life of the dosage form. The polypeptides and other ingredients may form suspensions, solutions, or emulsions in oily or aqueous vehicles, and may contain formulatory agents such as suspending, stabilizing and/or dispersing agents. Alternatively, the polypeptides, including antibodies, and other ingredients may be in powder form, obtained by aseptic isolation of sterile solid or by lyophilization from solution, for constitution with a suitable vehicle, e.g., sterile, pyrogen-free water, before use.

[0354] These formulations can contain pharmaceutically acceptable carriers, vehicles and adjuvants that are well known in the art. It is possible, for example, to prepare solutions using one or more organic solvent(s) that is/are acceptable from the physiological standpoint, chosen, in addition to water, from solvents such as acetone, ethanol, isopropyl alcohol, glycol ethers such as the products sold under the name “Dowanol,” polyglycols and polyethylene glycols, C₁-C₄ alkyl esters of short-chain acids, ethyl or isopropyl lactate, fatty acid triglycerides such as the products marketed under the name “Miglyol,” isopropyl myristate, animal, mineral and vegetable oils and polysiloxanes.

[0355] It is possible to add, if necessary, an adjuvant chosen from antioxidants, surfactants, other preservatives, film-forming, keratolytic or comedolytic agents, perfumes, flavorings and colorings. Antioxidants such as t-butylhydroquinone, butylated hydroxyanisole, butylated hydroxytoluene and α-tocopherol and its derivatives can be added.

[0356] In some examples, the polypeptides provided herein, including antibodies, are formulated as a microbicide, which is administered topically or to mucosal surfaces such as the vagina, the rectum, eyes, nose and the mouth. For topical administration, the polypeptides may be formulated as is known in the art for direct application to a target area. Forms chiefly conditioned for topical application take the form, for example, of creams, milks, gels, dispersion or microemulsions, lotions thickened to a greater or lesser extent, impregnated pads, ointments or sticks, aerosol formulations (e.g., sprays or foams), soaps, detergents, lotions or cakes of soap. Thus, in one example, a polypeptide provided herein can be formulated as a vaginal cream or a microbicide to be applied topically. Other conventional forms for this purpose include wound dressings, coated bandages or other polymer coverings, ointments, creams, lotions, pastes, jellies, sprays, and aerosols. Thus, one or more polypeptides can be delivered via patches or bandages for dermal administration. Alternatively, the polypeptides can be formulated to be part of an adhesive polymer, such as polyacrylate or acrylate/vinyl acetate copolymer. For long-term applications it might be desirable to use microporous and/or breathable backing laminates, so hydration or maceration of the skin can be minimized. The backing layer can be any appropriate thickness that will provide the desired protective and support functions. A suitable thickness will generally be from about 10 to about 200 microns.

[0357] Ointments and creams may, for example, be formulated with an aqueous or oily base with the addition of suitable thickening and/or gelling agents. Lotions may be formulated with an aqueous or oily base and will in general also contain one or more emulsifying agents, stabilizing agents, dispersing agents, suspending agents, thickening agents, or coloring agents. The active peptides also can be delivered via iontophoresis, e.g., as disclosed in U.S. Pat. No. 4,140,122; 4,383,529; or 4,051,842. The percent by weight of one or more polypeptides or antibodies present in a topical formulation will depend on various factors, but generally will be from 0.01% to 95% of the total weight of the formulation, and typically 0.1-85% by weight.

[0358] Drops, such as eye drops or nose drops, can be formulated with one or more of the polypeptides, including antibodies, provided herein in an aqueous or non-aqueous base also comprising one or more dispersing agents, solubilizing agents or suspending agents. Liquid sprays are conveniently delivered from pressurized packs. Drops can be delivered via a simple eye dropper-capped bottle, or via a plastic bottle adapted to deliver liquid contents dropwise, via a specially shaped closure.

[0359] The polypeptides can further be formulated for topical administration in the mouth or throat. For example, the active ingredients may be formulated as a lozenge further comprising a flavored base, usually sucrose and acacia or tragacanth; pastilles comprising the composition in an inert base such as gelatin and glycerin or sucrose and acacia; and mouthwashes comprising the composition in a suitable liquid carrier.

[0360] The pharmaceutical formulations containing the anti-HCV polypeptides provided herein include, as optional ingredients, pharmaceutically acceptable carriers, diluents, solubilizing or emulsifying agents, and salts of the type that are available in the art. Examples of such substances include normal saline solutions such as physiologically buffered saline solutions and water. Specific non-limiting examples of the carriers and/or diluents that are useful in the pharmaceutical formulations include water and physiologically acceptable buffered saline solutions such as phosphate buffered saline solutions pH 7.0-8.0.

[0361] The polypeptides provided herein, including or antibodies or fragments thereof also can be administered to the respiratory tract. Thus, also provided are aerosol pharmaceutical formulations and dosage forms for use in the methods herein. In general, such dosage forms comprise an amount of at least one of the polypeptides or antibodies effective to treat or prevent the clinical symptoms of the viral infection. Any statistically significant attenuation of one or more symptoms of the infection that has been treated pursuant to the method herein is considered to be a treatment of such infection.

[0362] Alternatively, for administration by inhalation or insufflation, the composition can take the form of a dry powder, for example, a powder mix of one or more polypeptides or antibodies and a suitable powder base such as lactose or starch. The powder composition may be presented in unit dosage form in, for example, capsules or cartridges, or, e.g., gelatin or blister packs from which the powder may be administered with the aid of an inhalator, insufflator, or a metered-dose inhaler (see, for example, the pressurized metered dose inhaler (MDI) and the dry powder inhaler disclosed in Newman, S. P. in Aerosols and the Lung, Clarke, S. W. and Davia, D. eds., pp. 197-224, Butterworths, London, England, 1984).

[0363] The anti-HCV polypeptides, including antibodies or fragments thereof, also can be administered in an aqueous solution when administered in an aerosol or inhaled form. Thus, other aerosol pharmaceutical formulations can contain, for example, a physiologically acceptable buffered saline solution containing between about 0.1 mg/mL and about 100 mg/mL of one or more of the polypeptides or antibodies specific for the indication or disease to be treated. Dry aerosol in the form of finely divided solid polypeptide or antibody particles that are not dissolved or suspended in a liquid also can be useful. Polypeptides can be formulated as dusting powders and comprise finely divided particles having an average particle size of between about 1 and 5 μm, alternatively between 2 and 3 μm. Finely divided particles may be prepared by pulverization and screen filtration using techniques well known in the art. The particles may be administered by inhaling a predetermined quantity of the finely divided material, which can be in the form of a powder. It will be appreciated that the unit content of active ingredient or ingredients contained in an individual aerosol dose of each dosage form need not in itself constitute an effective amount for treating the particular infection, indication or disease since the necessary effective amount can be reached by administration of a plurality of dosage units. Moreover, the effective amount may be achieved using less than the dose in the dosage form, either individually, or in a series of administrations.

[0364] For administration to the upper (nasal) or lower respiratory tract by inhalation, the polypeptides can be delivered from a nebulizer or a pressurized pack or other convenient means of delivering an aerosol spray. Pressurized packs may comprise a suitable propellant such as dichlorodifluoromethane, trichlorofluoromethane, dichlorotetrafluoroethane, carbon dioxide or other suitable gas. In the case of a pressurized aerosol, the dosage unit may be determined by providing a valve to deliver a metered amount. Nebulizers include, but are not limited to, those described in U.S. Pat. Nos. 4,624,251; 3,703,173; 3,561,444; and 4,635,627. Aerosol delivery systems of the type disclosed herein are available from numerous commercial sources including Fisons Corporation (Bedford, Mass.), Schering Corp. (Kenilworth, N.J.) and American Pharmoseal Co., (Valencia, Calif.). For intra-nasal administration, the therapeutic agent also can be administered via nose drops, a liquid spray, such as via a plastic bottle atomizer or metered-dose inhaler. Typical of atomizers are the Mistometer (Wintrop) and the Medihaler (Riker).

[0365] An exemplary formulation involves lyophilized polypeptides, including antibodies, and a separate pharmaceutical carrier. Immediately prior to administration, the formulation is constituted by combining the lyophilized polypeptides and pharmaceutical carrier. Administration by a parenteral or oral regimen will deliver the polypeptides or antibodies to the desired site of action. Pharmaceutical formulations of the polypeptides can be prepared as liquids, gels and suspensions. The formulations typically are suitable for injection, insertion or inhalation. Injection can be accomplished by needle, cannula, catheter and the like. Insertion can be accomplished by lavage, trochar, spiking, surgical placement and the like. Inhalation can be accomplished by aerosol, spray or mist formulation. The polypeptides, including antibodies, also can be administered topically such as to the epidermis, the buccal cavity and instillation into the ear, eye and nose. The polypeptides can be present in the pharmaceutical formulation at concentrations ranging from about 1 percent to about 50 percent, preferably about 1 percent to about 20 percent, more preferably about 2 percent to about 10 percent by weight relative to the total weight of the formulation.

[0366] The anti-HCV polypeptides provided herein, including antibodies and fragments thereof, also can be used in combination with one or more known therapeutic agents, for example, a pain reliever; an antiviral agent such as an anti-HBV, other anti-HCV (HCV inhibitor, HCV protease inhibitor) or an anti-herpetic agent; an antibacterial agent; an anti-cancer agent; an anti-inflammatory agent; an antihistamine; a bronchodilator and appropriate combinations thereof, whether for the conditions described or some other condition.

[0367] 7. Miscellaneous Compositions and Articles of Manufacture

[0368] Provided are articles of manufacture that include a pharmaceutical composition containing one or more polypeptides or antibodies for controlling microbial infections. The articles can contain a therapeutically effective amount of a pharmaceutical composition for controlling or preventing HCV infection. The device can be packaged in a kit along with instructions for using the pharmaceutical composition for control of the infection. The pharmaceutical composition includes at least one polypeptide or antibody, in a therapeutically effective amount such that viral infection is controlled.

[0369] An article of manufacture can be a vessel or filtration unit that can be used for collection, processing or storage of a biological sample containing a polypeptide or antibody. The vessel may be evacuated. Vessels include, without limitation, a capillary tube, a vacutainer, a collection bag for blood or other body fluids, a cannula, a catheter. The filtration unit can be part of another device, for example, a catheter for collection of biological fluids. The polypeptides can be adsorbed onto or covalently attached to the article of manufacture, for example, a vessel or filtration unit. Thus, when material in the article is decanted therefrom or passed through, the material will not retain substantial amounts of the polypeptides. However, adsorption or covalent attachment of the polypeptides, including antibodies, to the article kills viruses or prevents their transmission, thereby helping to control viral infection. Thus, for example, the one or more polypeptides can be in filtration units integrated into biological collection catheters and vials, or added to collection vessels to remove or inactivate viral particles that may be present in the biological samples collected, thereby preventing transmission of the disease.

[0370] Provided are compositions containing one or more polypeptides provided herein, including one or more antibodies, and one or more clinically useful agents such as a biological stabilizer. Biological stabilizer includes, without limitation, an anticoagulant, a preservative and a protease inhibitor. Anticoagulants include, without limitation, oxalate, ethylene diamine tetraacetic acid, citrate and heparin. Preservatives include, without limitation, boric acid, sodium formate and sodium borate. Protease inhibitors include inhibitors of dipeptidyl peptidase IV. Compositions comprising a polypeptide and a biological stabilizer may be included in a collection vessel such as a capillary tube, a vacutainer, a collection bag for blood or other body fluids, a cannula, a catheter or any other container or vessel used for the collection, processing or storage of biological samples.

[0371] Also provided are compositions containing one or more polypeptides provided herein, including one or more antibodies, and a biological sample such as blood, semen or other body fluids that is to be analyzed in a laboratory or introduced into a recipient mammal. For example, the polypeptides can be mixed with blood prior to laboratory processing and/or transfusions. The polypeptides can be present in at least about 0.15 mg/mL of the sample, e.g. 0.16 mg/mL, 0.17 mg/mL, 0.18 mg/mL, 0.19 mg/mL, 0.2 mg/mL, 0.22 mg/mL, 0.24 mg/mL, 0.25 mg/mL, 0.27 mg/mL, 0.3 mg/mL, 0.35 mg/mL, 0.4 mg/mL or more than 0.4 mg/mL of the sample.

[0372] In some examples, polypeptides provided herein, including antibodies, can be included in physiological media used to store and transport biological tissues, including transplantation tissues. Thus, for example, liver, heart, kidney and other tissues can be bathed in media containing the polypeptides to inhibit viral transmission to transplant recipients. In this case, the one or more polypeptides or antibodies is present in at least about 1.5 mg/kg of the sample, e.g. 1.6 mg/kg, 1.7 mg/kg, 1.8 mg/kg, 1.9 mg/kg, 2 mg/kg, 2.2 mg/kg, 2.4 mg/kg, 2.5 mg/kg, 2.7 mg/kg, 2.8 mg/kg, 2.9 mg/kg, 3 mg/kg, 3.5 mg/kg, 4 mg/kg or more than 4 mg/kg.

### D. MODIFIED E1 AND E2 POLYPEPTIDES

[0373] Provided are modified E1 and E2 polypeptides. In some instances, the modified E1 and E2 polypeptides, when expressed as an E1E2 complex on the surface of HCV or a virus-like particle, can result in increased infectivity of the virus or virus-like particle compared to one expressing unmodified E1 or E2 polypeptides. Few HCV isolates, including the JFH-1 isolate and chimeric viruses constructed using JFH-1 as a backbone and structural proteins from other isolates, (also known as HCVcc) or HCV E1E2 envelope glycoprotein complexes cloned from human samples for the generation of HCV pseudotype particles (also known as HCVpp) can produce infectious virions for in vitro assays, such as antibody neutralization assays and anti-viral drug screening. Mutations that can enhance viral infectivity can, therefore, be of particular use for the construction of recombinant HCVcc or HCVpp to increase their infectivity in vitro and possibly in vivo. Thus, the modified E1 and E2 polypeptides provided herein can be used to generate genetically diverse, infectious HCV, including HCVcc and HCVpp, which can be used, for example, in infectivity assays, such as for screening anti-HCV antibodies or other anti-viral agents. The modified E1 and E2 polypeptides provided herein also can be used to generate functional recombinant E1E2 complexes, which can be used, for example, for screening anti-HCV antibodies and other anti-HCV agents, including polypeptides, peptides and drugs.

[0374] Modifications in an E1 or E2 polypeptide can be made to any form of an E1 or E2 polypeptide known in the art, including any E1 or E2 polypeptide from any HCV isolate. For example, the modifications provided herein can be made in the E1 or E2 regions within the HCV polyprotein, or in E1 or E2 polypeptides that are not part of the HCV polyprotein, such as following posttranslational cleavage or by recombinant expression of the E1 or E2 polypeptides alone or as part of the E1E2 complex. For example, modifications in an E1 polypeptide can be made in any polypeptide that contains an E1 polypeptide from any HCV isolate, variant or fragment thereof that has 40%, 50%, 60%, 70%, 80%, 90%, 91%, 92%, 93%, 94%, 95%, 96%, 97%, 98%, or 99% sequence identity to the E1 polypeptide set forth in SEQ ID NO: 1337. Modifications in an E2 polypeptide can be made in any polypeptide that contains an E2 polypeptide from any HCV isolate, variant or fragment thereof that has 40%, 50%, 60%, 70%, 80%, 90%, 91%, 92%, 93%, 94%, 95%, 96%, 97%, 98%, or 99% sequence identity to the E2 polypeptide set forth in SEQ ID NO: 1312. Modifications in an E1 or E2 polypeptide can be made to an E1 or E2 polypeptide that also contains other modifications, such as those described in the art, including modifications of the primary sequence and modifications not in the primary sequence of the polypeptide. For example, modifications can be made in truncated E1 or E2 polypeptides, such as those that lack the C-terminal transmembrane domain. Thus, provided herein are soluble modified E1 and E2 polypeptides. In another example, the modifications to an E2 polypeptide are made in an E2 polypeptide that lacks all or a portion of the N-terminal hypervariable region, such as all or a portion of amino acid residues 384 to 411.

[0375] Modifications provided herein of a starting, unmodified reference polypeptide include amino acid replacements or substitution, additions or deletions of amino acids, or any combination thereof. For example, modified E1 and modified E2 polypeptides include those with 1, 2, 3, 4, 5, 6, 7, 8, 9, 10, 11, 12, 13, 14, 15, 16, 17, 18, 19, 20, 30, 40, 50 or more modified positions. Any modification provided herein can be combined with any other modification known to one of skill in the art. Typically, the resulting modified E1 or E2 polypeptide retains the ability to form an E1E2 complex. When expressed as part of HCV or a virus-like particle, the virus or virus like particle typically retains its ability to infect a host cell. In some instances, the virus or virus like particle containing the modified E1 and/or E2 polypeptide exhibits increased infectivity compared to a virus or virus like particle containing an unmodified E1 or E2 polypeptide.

[0376] The modifications provided herein can be made by standard recombinant DNA techniques such as are routine to one of skill in the art. Any method known in the art to effect mutation of any one or more amino acids in a target protein can be employed. Methods include standard site-directed mutagenesis (using e.g., a kit, such as QuikChange available from Stratagene) of encoding nucleic acid molecules, or by solid phase polypeptide synthesis methods. Other modifications that are or are not in the primary sequence of the polypeptide also can be included in a modified E1 or E2 polypeptide, or conjugate thereof, including, but not limited to, the addition of a carbohydrate moiety, the addition of a polyethylene glycol (PEG) moiety, the addition of an Fc domain, etc. For example, such additional modifications can be made to increase the stability or half-life of the protein.

[0377] 1. Exemplary E1 Modifications

[0378] Provided are modified E1 polypeptides, including modified E1 polypeptides that form an E1E2 complex with an E2 polypeptide. In some examples, the modified E1 polypeptides are expressed on the surface of a virus, such as HCV, or a virus-like particle. The resulting virus or virus-like particle can exhibit altered infectivity compared to a virus or virus-like particle that expresses an unmodified E1 polypeptide. In some examples, the virus or virus-like particle that expresses a modified E1 polypeptide exhibits increased infectivity compared to a virus or virus-like particle that expresses an unmodified E1 polypeptide. The increased infectivity of the virus or virus-like particle that expresses a modified E1 polypeptide can be increased by at least or about 1%, 2%, 3%, 4%, 5%, 6%, 7%, 8%, 9%, 10%, 20%, 30%, 40%, 50%, 60%, 70%, 80%, 90%, 100%, 110%, 120%, 130%, 140%, 150%, 160%, 170%, 180%, 190%, 200%, 300%, 400%, 500%, or more compared to the infectivity of the virus or virus-like particle that expresses an unmodified E1 polypeptide. In some examples, the virus or virus-like particle that expresses a modified E1 polypeptide exhibits decreased infectivity compared to a virus or virus-like particle that expresses an unmodified E1 polypeptide. The decreased infectivity of the virus or virus-like particle that expresses the modified E1 polypeptide can be decreased by at least or about 1%, 2%, 3%, 4%, 5%, 6%, 7%, 8%, 9%, 10%, 20%, 30%, 40%, 50%, 60%, 70%, 80%, 90%, or more compared to the infectivity of the virus or virus-like particle that expresses an unmodified E1 polypeptide.

[0379] Exemplary of the modified E1 polypeptides are those E1 polypeptides that contain a modification at amino acid position 192, 193, 194, 195, 196, 198, 201, 204, 205, 206, 209, 211, 212, 221, 222, 224, 225, 227, 228, 234, 236, 239, 244, 246, 255, 258, 259, 260, 261, 263, 266, 269, 273, 274, 276, 278, 279, 282, 289, 291, 292, 293, 294, 295, 296, 298, 302, 305, 307, 309, 311, 314, 315, 316, 317, 318, 319, 320, 321, 322, 323, 324, 326, 327, 328, 329, 339, 341, 346, 350, 352, 353 or 354, with numbers corresponding to the HCV polypeptide set forth in SEQ ID NO:607.

[0380] As is customary, amino acid positions of mature HCV proteins, such as E1, are numbered relative to the HCV polypeptide, such as that set forth in SEQ ID NO:607, not the mature polypeptide. Thus, for example, above-referenced amino acid position 192 corresponds to position 1 of the mature E1 polypeptide from HCV genotype 1a H77 with a sequence set forth in SEQ ID NO:1337. Similarly, above-referenced position 193, 194, 195, 196, 198, 201, 204, 205, 206, 209, 211, 212, 221, 222, 224, 225, 227, 228, 234, 236, 239, 244, 246, 255, 258, 259, 260, 261, 263, 266, 269, 273, 274, 276, 278, 279, 282, 289, 291, 292, 293, 294, 295, 296, 298, 302, 305, 307, 309, 311, 314, 315, 316, 317, 318, 319, 320, 321, 322, 323, 324, 326, 327, 328, 329, 339, 341, 346, 350, 352, 353 and 354 correspond to positions 2, 3, 4, 7, 10, 13, 14, 15, 18, 20, 21, 30, 31, 33, 34, 36, 43, 44, 48, 53, 55, 64, 67, 68, 69, 70, 72, 75, 78, 82, 83, 85, 87, 88, 91, 98, 100, 101, 102, 103, 104, 105, 107, 111, 114, 115, 118, 120, 123, 124, 125, 126, 127, 128, 129, 130, 131, 132, 133, 135, 136, 137, 138, 148, 150, 155, 159, 161, 162, and 163 of the mature E1 polypeptide from HCV genotype 1a H77 with a sequence set forth in SEQ ID NO:1337.

[0381] These amino acid positions can be modified such as by amino acid replacement, deletion or substitution. The residues at these positions can be replaced or substituted with any another amino acid, such as, for example, tyrosine (Tyr, Y), glycine (Gly, G), phenylalanine (Phe, F), methionine (Met, M), alanine (Ala, A), serine (Ser, S), isoleucine (Ile, I), leucine (Leu, L), threonine (Thr, T), valine (Val, V), proline (Pro, P), lysine (Lys, K), histidine (His, H), glutamine (Gln, Q), glutamic acid (Glu, E), tryptophan (Tip, W), arginine (Arg, R), aspartic acid (Asp, D), asparagine (Asn, N) or cysteine (Cys, C). In one example, the residue at amino acid position 192, 193, 194, 195, 196, 198, 201, 204, 205, 206, 209, 211, 212, 221, 222, 224, 225, 227, 228, 234, 236, 239, 244, 246, 255, 258, 259, 260, 261, 263, 266, 273, 276, 278, 279, 282, 289, 291, 292, 293, 294, 295, 296, 298, 302, 305, 307, 309, 311, 314, 315, 316, 317, 318, 320, 321, 322, 323, 324, 326, 327, 328, 329, 339, 341, 346, 350, 352, 353 or 354 (with numbering relative to the polyprotein set forth in SEQ ID NO:607) is replaced with an alanine (Ala, A). In another example, the amino acid residue at position 269, 274 or 319 is replaced with a glycine (Gly, G). Combination mutants in which amino acid replacements are made at more than one of the above-identified positions in an E1 polypeptide also can be generated. The modified E1 polypeptide can contain 1, 2, 3, 4, 5, 6, 7, 8, 9, 10 or more modifications. Included among such combination mutants are those having two or more mutations at amino acid positions 196, 209, 234, 305 and 325. The modifications can be made in any E1 polypeptide, including, but not limited to, the E1 polypeptides having a sequence of amino acids set forth in any of SEQ ID NOS:1337-1361. Table 7 provides non-limiting examples of exemplary amino acid replacements at the identified positions, and provides the sequence identifier that sets forth the amino acid sequence of the resulting modified E1 polypeptide.

TABLE 7
E1 mutants

| Mutation | SEQ ID NO |
|---|---|
| xN196A/xN209A | 1206 |
| xN196A/xN234A | 1207 |
| xN196A/xN305A | 1208 |
| xN196A/xN325A | 1209 |
| xN305A/xN209A | 1210 |
| xN305A/xN234A | 1211 |
| xN305A/xN325A | 1212 |
| Y192A | 1213 |
| Q193A | 1214 |
| V194A | 1215 |
| R195A | 1216 |
| xN196A | 1217 |
| S198A | 1218 |
| Y201A | 1219 |
| T204A | 1220 |
| N205A | 1221 |
| D206A | 1222 |
| xN209A | 1223 |
| S211A | 1224 |
| I212A | 1225 |
| L221A | 1226 |
| H222A | 1227 |
| P224A | 1228 |
| G225A | 1229 |
| V227A | 1230 |
| P228A | 1231 |
| xN234A | 1232 |
| S236A | 1233 |
| W239A | 1234 |
| P244A | 1235 |
| V246A | 1236 |
| T255A | 1237 |
| L258A | 1238 |
| R259A | 1239 |
| H261A | 1240 |
| D263A | 1241 |
| V266A | 1242 |
| A269G | 1243 |
| S273A | 1244 |
| A274G | 1245 |
| Y276A | 1246 |
| G278A | 1247 |
| D279A | 1248 |
| G282A | 1249 |
| Q289A | 1250 |
| F291A | 1251 |
| T292A | 1252 |
| F293A | 1253 |
| S294A | 1254 |
| P295A | 1255 |
| R296A | 1256 |
| H298A | 1257 |
| Q302A | 1258 |
| xN305A | 1259 |
| S307A | 1260 |
| Y309A | 1261 |
| G311A | 1262 |
| T314A | 1263 |
| G315A | 1264 |
| H316A | 1265 |
| R317A | 1266 |
| M318A | 1267 |
| A319G | 1268 |
| W320A | 1269 |
| D321A | 1270 |
| M322A | 1271 |
| M323A | 1272 |
| M324A | 1273 |
| xN325A | 1274 |
| W326A | 1275 |
| S327A | 1276 |
| P328A | 1277 |
| T329A | 1278 |
| R339A | 1279 |
| P341A | 1280 |
| D346A | 1281 |
| G350A | 1282 |
| H352A | 1283 |
| W353A | 1284 |
| G354A | 1285 |

[0382] In some examples, a virus or virus-like particle, such as HCVcc or HCVpp, that expresses a modified E1 polypeptide exhibits increased infectivity compared to a virus or virus-like particle that expresses an unmodified E1 polypeptide. The increased infectivity of the virus or virus-like particle that expresses a modified E1 polypeptide can be increased by at least or about 1%, 2%, 3%, 4%, 5%, 6%, 7%, 8%, 9%, 10%, 20%, 30%, 40%, 50%, 60%, 70%, 80%, 90%, 100%, 110%, 120%, 130%, 140%, 150%, 160%, 170%, 180%, 190%, 200%, 300%, 400%, 500%, or more compared to the infectivity of the virus or virus-like particle that expresses an unmodified E1 polypeptide. Exemplary of modified E1 polypeptides that can be expressed by a virion, resulting in increased infectivity of the virion compared to one that expresses an unmodified E1 polypeptide, are polypeptides containing a modification at an amino acid position corresponding to amino acid positions 192, 194, 195, 224, 227, 255, 293, 294, 295, 314, 316, 317, 324, or 325 (with amino acid numbering relative to the HCV polyprotein set forth in SEQ ID NO:607). Exemplary modified E1 polypeptides include those with a modification corresponding to Y192A, V194A, R195A, P224A, V227A, T255A, F293A, S294A, P295A, T314A, H316A, R317A, M324A or N325A, including a modified E1 polypeptide with a sequence set forth in any of SEQ ID NOS:1213, 1215, 1216, 1228, 1230, 1237, 1253, 1254, 1255, 1263, 1265, 1266, 1273 and 1274, respectively. The modified E1 polypeptides provided herein can be used to generate recombinant HCVcc or HCVpp that infect host cells at higher infectivity than recombinant HCVcc or HCVpp that contain an unmodified E1 polypeptide. (see, e.g. Examples 4 and 6). In some examples, the virus or virus-like particles containing the modified E1 polypeptides also can exhibit increased resistance to antibody neutralization.

[0383] 2. Exemplary E2 Modifications

[0384] Provided are modified E2 polypeptides, including modified E2 polypeptides that form an E1E2 complex with an E1 polypeptide. In some examples, the modified E2 polypeptides are expressed on the surface of a virus, such as HCV, or a virus-like particle. The resulting virus or virus-like particle can exhibit altered infectivity compared to a virus or virus-like particle that expresses an unmodified E2 polypeptide. In some examples, the virus or virus-like particle that expresses a modified E2 polypeptide exhibits increased infectivity compared to a virus or virus-like particle that expresses an unmodified E2 polypeptide. In other examples, the virus or virus-like particle that expresses a modified E2 polypeptide exhibits decreased infectivity compared to a virus or virus-like particle that expresses an unmodified E2 polypeptide.

[0385] Exemplary of the modified E2 polypeptides are those that contain a modification at an amino acid position corresponding to amino acid position 425, 427, 428, 435, 436, 439, 441, 442, 443, 447, 448, 614, 617, 618, 619, 621, 623, 624, 630, 634, 635, 637, 638, 639, 642 or 643, with numbering relative to the HCV polyprotein set forth in SEQ ID NO:607. As noted above, amino acid positions of mature HCV proteins, such as E2, are numbered relative to the HCV polypeptide, such as that set forth in SEQ ID NO:607, not the mature polypeptide. Thus, for example, above-referenced amino acid position 425 corresponds to position 42 of the mature E2 polypeptide from HCV genotype 1a H77 with a sequence set forth in SEQ ID NO:1312.

[0386] These amino acid positions can be modified such as by amino acid replacement, deletion or substitution. The residues at these positions can be replaced or substituted with any other amino acid, such as, for example, tyrosine (Tyr, Y), glycine (Gly, G), phenylalanine (Phe, F), methionine (Met, M), alanine (Ala, A), serine (Ser, S), isoleucine (Ile, I), leucine (Leu, L), threonine (Thr, T), valine (Val, V), proline (Pro, P), lysine (Lys, K), histidine (His, H), glutamine (Gln, Q), glutamic acid (Glu, E), tryptophan (Trp, W), arginine (Arg, R), aspartic acid (Asp, D), asparagine (Asn, N) or cysteine (Cys, C). In one example, the residue at amino acid position 425, 427, 428, 435, 436, 441, 442, 443, 447, 448, 614, 617, 618, 619, 621, 623, 624, 630, 634, 635, 637, 638 or 639 is replaced with an alanine (Ala, A). In another example, the amino acid residue at position 439, 642 or 643 is replaced with a glycine (Gly, G). Combination mutants in which amino acid replacements are made at more than one of the above-identified positions in an E2 polypeptide also can be generated. The modified E2 polypeptide can contain 1, 2, 3, 4, 5, 6, 7, 8, 9, 10 or more modifications. The modifications can be made in any E2 polypeptide, including, but not limited to, the E2 polypeptides having a sequence of amino acids set forth in any of SEQ ID NOS:1312-1336. Table 8 provides non-limiting examples of exemplary amino acid replacements at the identified positions, and provides the sequence identifier that sets forth the amino acid sequence of the resulting modified E2 polypeptide.

TABLE 8
Additional E2 mutants

| Mutation | SEQ ID NO |
|---|---|
| T425A | 1286 |
| L427A | 1287 |
| N428A | 1288 |
| T435A | 1289 |
| G436A | 1290 |
| A439A | 1291 |
| L441A | 1292 |
| F442A | 1293 |
| Y443A | 1294 |
| F447A | 1295 |
| N448A | 1296 |
| R614A | 1297 |
| R617A | 1298 |
| Y618A | 1299 |
| P619A | 1300 |
| T621A | 1301 |
| N623A | 1302 |
| Y624A | 1303 |
| R630A | 1304 |
| G634A | 1305 |
| G635A | 1306 |
| E637A | 1307 |
| H638A | 1308 |
| R639A | 1309 |
| A642G | 1310 |
| A643G | 1311 |

[0387] 3. Production of the Modified E1 and E2 Polypeptides

[0388] The modified E1 and E2 polypeptides provided herein can be obtained by methods well known in the art for protein purification and recombinant protein expression. Any method known to those of skill in the art for identification of nucleic acids that encode desired genes can be used to obtain the nucleic acids encoding E1 and E2. Any method available in the art can be used to obtain a nucleic acid encoding an E1 or E2 polypeptide. Modified E1 and E2 polypeptides can be engineered as described herein, such as by site-directed mutagenesis. The modified E1 and E2 polypeptide can be expressed alone, as part of an E1E2 complex, or on a hepatitis C virus, such as HCVcc or HCVpp.

[0389] E1 and E2 polypeptides can be cloned or isolated using any available methods known in the art for cloning and isolating nucleic acid molecules. Such methods include PCR amplification of nucleic acids and screening of libraries, including nucleic acid hybridization screening, antibody-based screening and activity-based screening.

[0390] Methods for amplification of nucleic acids can be used to isolate nucleic acid molecules encoding a polypeptide, including for example, polymerase chain reaction (PCR) methods. A nucleic acid containing material can be used as a starting material from which an E1- or E2-encoding nucleic acid molecule can be isolated. For example, tissue extracts (e.g. from liver) or fluid samples (e.g. blood, serum, saliva) from a subject infected with hepatitis C virus can be used in amplification methods. Nucleic acid libraries also can be used as a source of starting material. Primers can be designed to amplify an E1- or E2-encoding molecule. For example, primers can be designed based on expressed sequences from which an E1 or E2 polypeptide is generated. Primers can be designed based on back-translation of an E1 or E2 amino acid sequence. Nucleic acid molecules generated by amplification can be sequenced and confirmed to encode the E1 or E2 polypeptide. Additional nucleotide sequences can be joined to an E1- or E2-encoding nucleic acid molecule, including linker sequences containing restriction endonuclease sites for the purpose of cloning the synthetic gene into a vector, for example, a protein expression vector or a vector designed for the amplification of the DNA sequences.

[0391] The identified and isolated nucleic acids can then be inserted into an appropriate cloning vector. Vectors and compatible expression systems are discussed above and can be used to produce the modified E1 and E2 polypeptides provided herein. Methods of polypeptide purification also are discussed above, and can be similarly used to purify the modified E1 or modified E2 polypeptides. The modified E1 and E2 polypeptide can be expressed and purified alone (i.e. as recombinant E1 or E2 polypeptides), as part of an E1E2 complex, or can be expressed on a hepatitis C virus, such as HCVcc or HCVpp. The modified E1 and E2 polypeptides also can contain additional modifications, as described in detail above, such as pegylation. While the methods discussed above for producing and purifying polypeptides can be used to produce the modified E1 or modified E2 polypeptides provided herein, the discussion below includes particular exemplary methods for producing these polypeptides.

[0392] a. Nucleic Acids Encoding Modified E1 and/or E2

[0393] Provided herein are nucleic acids encoding modified E1 polypeptides or modified E2 polypeptides. Nucleic acids encoding modified E1 polypeptides or modified E2 polypeptides can be generated from nucleic acids encoding the naturally-occurring HCV polyprotein using methods known to those of skill in the art. For example, nucleic acids encoding modified E1 polypeptides or modified E2 polypeptides containing various amino acid substitutions can be produced by site-specific mutagenesis and polymerase chain reaction (PCR) amplification from the nucleic acids encoding the naturally-occurring HCV polyprotein. Nucleic acid sequences encoding the naturally-occurring HCV polyproteins are well known in the art, and include, for example, those set forth in Genbank Accession AF009606; D10749; U01214; AY051292; AY746460; AY232731; D50409; DQ155561; AB031663; DQ437509; D49374; D63821; Y11604; DQ516083; EF589160; AF064490; AY859526; NC009827; EF420130; DQ314805; DQ835764; D63822; D84264; DQ835763; and DQ278894.

[0394] Methods for isolating nucleic acids encoding the naturally-occurring HCV polyprotein, as well as technologies for generation of nucleic acids encoding E1 or E2 polypeptides are known to those of skill in the art. See for example, Current Protocols in Molecular Biology, Ausubel et al. edts. (John Wiley & Sons, Inc., 1999) or Molecular Cloning: A Laboratory Manual, Sambrook et al. (Cold Spring Harbor Laboratory Press, New York, 1989).

[0395] In some examples, nucleic acid encoding only E1 or E2 are used to produce the modified E1 or E2 polypeptides provided herein. In other examples, nucleic acid molecules encoding both E1 and E2 are used, such that an E1E2 complex is produced upon expression. Exemplary of a nucleic acid molecule encoding unmodified E1E2 is set forth in SEQ ID NO:985. Example 1, below, describes the cloning of nucleic acid encoding E1E2 from HCV-infected human serum. Such nucleic acid can then be modified using methods well known in the art, such as site directed mutagenesis, to produce nucleic acid encoding modified E1 and/or modified E2. In some example, only the nucleic acid encoding E1 is modified. In other examples, only the nucleic acid encoding E2 is modified. In further example, the nucleic acids encoding both E1 and E2 are modified.

[0396] b. Vectors and Expression Systems

[0397] Nucleic acid encoding a the modified E1 and/or modified E2 polypeptides can be operably-linked to an expression control sequence in an expression vector, which can be introduced into a host cell for expression of the encoded polypeptide or administered to a mammal to elicit an immune response against the polypeptide. The expression vector also can include other sequences such as enhancer sequences, synthetic introns, adenovirus tripartite leader (TPL) sequences and modified polyadenylation and transcriptional termination sequences, e.g. bovine growth hormone or rabbit beta-globulin polyadenylation sequences, to improve expression of the nucleic acid encoding the polypeptides.

[0398] Nucleic acids encoding modified E1 and/or modified E2 polypeptides can be incorporated into viral, bacterial, insect, yeast or mammalian expression vectors. As such, nucleic acids encoding modified E1 and/or modified E2 polypeptides can be operably-linked to expression control sequences such as viral, bacterial, insect, yeast or mammalian promoters and enhancers. Examples of expression control sequences such as enhancers and promoters include viral promoters such as SV 40 promoter, Rous Sarcoma Virus (RSV) promoter, and cytomegalovirus (CMV) immediate early promoter. Examples of viral vectors include retrovirus-based vectors, e.g. Lentiviruses, Adenoviruses and Adeno-associated viruses.

[0399] In a particular example, nucleic acid encoding E1E2 is cloned into the pcDNA3.1/V5-His TOPO TA vector, which facilitates both bacterial and mammalian expression. DNA sequencing of nucleic acid from bacterial clones can be performed to confirm the correct nucleic acid sequence, then the same vectors can be transfected into a suitable mammalian cell, such as 293T cells, for expression. Because E1 and E2 are both glycoproteins, expression typically is performed in cells that facilitate correct glycosylation of the polypeptides, which itself aides correct folding of the polypeptides. Exemplary host cells that facilitate glycosylation of recombinant polypeptides are provided above, and include, for example, mammalian cells, such as 293T cells and Huh7 cells. In some examples, the nucleic acid encoding the E1, E2 or E1E2 is introduced into a viral vector, such as, for example, a vaccinia vector. Such vectors can be introduced into mammalian cells for expression of the encoded polypeptides (see, e.g. Example 1).

[0400] The nucleic acid encoding modified E1 and/or modified E2 polypeptides also can be linked to nucleic acid sequences that code for unrelated amino acid sequences such as N-terminal ubiquitin signals to improve antigen targeting, a poly-histidine sequence, a FLAG (DYKDDDDK) sequence (SEQ ID NO:685), an HA sequence (SEQ ID NO:687), a myc sequence (SEQ ID NO:688), a V5 sequence (SEQ ID NO:984), a chitin binding protein sequence, a maltose binding protein sequence or a glutathione-S-transferase sequence.

[0401] Expression vectors containing nucleic acids encoding modified E1 and/or modified E2 polypeptides can be introduced into bacterial, insect, yeast or mammalian host cells for expression using conventional methods including, without limitation, transformation, transduction and transfection.

[0402] c. Purification and Assessment

[0403] When expressed in bacterial, yeast, insect or mammalian host cells, modified E1 and/or modified E2 polypeptides can be purified using a variety of methods, including those discussed above in section C.3.d. In some examples, modified E1, E2 or E1E2 complexes are purified by affinity chromatography using appropriate antibodies that bind to these polypeptides, such as, for example, anti-HCV antibodies AR3A, AR3B, AR3C, AR3D, N4 or V1 in combination with size exclusion chromatography. For example, modified E1 and/or modified E2 polypeptides can be separated from unrelated proteins by affinity chromatography using an appropriate binding antibody. The polypeptide can be eluted at acidic, neutral or basic pH using: (1) 0.2M glycine pH 2.2, (2) 2M sodium thiocyanate (pH adjusted to pH 7.4 with 50 mM Tris-HCl); or (3) 0.2M glycine pH 11.5, and then further purified by size-exclusion chromatography (see e.g., U.S. patent application Ser. No. 12/290,017). Because the above described antibodies recognize conformational epitopes, E1, E2 and/or E1E2 that are properly folded can be isolated.

[0404] Similar methods can be used to determine whether the purified, modified polypeptide or E1E2 complex is correctly folded. Included among the anti-HCV antibodies provided herein are those that recognize conformational epitopes on E1 and E2 and on the E1E2 complex. As described in Example 4, modified E1 and E2 polypeptides expressed as an E1E2 complex can be characterized using the conformational antibodies. If an antibody that binds a conformational epitope on an unmodified E1E2 does not bind the modified E1E2 complex, then the modification is one that affects the correct folding of the polypeptide. In another example, the modified E1 or E2 can be expressed on a hepatitis C virus, such as HCVcc or HCVpp, and the infectivity of this virus can be compared to the infectivity of a virus that contains an unmodified E1 or E2, respectively (see e.g., Example 4). The effect of the modification on the ability of the virus to infect and replicate in host cells, such as Huh7 or 293 cells, can then be assessed.

[0405] 4. Uses for the Modified E1 and E2 Polypeptides.

[0406] The modified E1 and E2 polypeptides provided herein can be used, for example, to make genetically diverse infectious HCV for different infectivity assays and also to make highly functional recombinant HCV E1E2 complexes for antibody and drug screening. The modified E1 or E2 polypeptides provided herein can be used to generate HCVcc or HCVpp. Thus, provided herein are hepatitis C viruses that express the modified E1 and/or E2 polypeptides provided herein. In some examples, the hepatitis C virus expressing the modified E1 or E2 polypeptides exhibit increased infectivity compared to the hepatitis C virus expressing the unmodified E1 or E2 polypeptides, respectively. These HCV can be of particular use, for example, in assays, such as neutralization assays, to assess anti-viral agents. The anti-viral agents include, but are not limited to, polypeptides, including anti-HCV antibodies, interferons, cytokines and toxins, small molecules and drugs, and antisense molecules. Methods for performing these assays are well known in the art, and typically include contacting the virus with the anti-viral agent, then infecting a suitable host cell, such as Huh7 or 293T cells. In some examples, the cells are infected with the HCV before being contacted with the anti-viral agent. In other examples, the cells are infected after the virus is incubated with the anti-viral agent. In some examples, a combination of anti-viral agents are tested. For example, any one or more of the anti E2 or E1E2 antibodies provided herein can be assessed using neutralization assays that utilize HCV containing the modified E1 or E2 polypeptides provided herein. In other examples, other anti-HCV antibodies also are included, such as in combination with the anti E2 or E1E2 antibodies provided herein.

[0407] 5. Articles of Manufacture and Kits

[0408] Modified E1 or E2 polypeptides, E1E2 complexes containing the modified E1 or E2 polypeptides, HCV containing the modified E1 or E2 polypeptides, or encoding nucleic acids thereof, can be packaged as articles of manufacture. The articles of manufacture provided herein can contain packaging materials. Packaging materials for use in packaging pharmaceutical products are well known to those of skill in the art. See, for example, U.S. Pat. Nos. 5,323,907, 5,052,558 and 5,033,352, each of which is incorporated herein in its entirety. Examples of packaging materials include, but are not limited to, blister packs, bottles, tubes, inhalers, pumps, bags, vials, containers, syringes, bottles, and any packaging material suitable for a selected formulation and intended mode of administration and treatment.

[0409] Modified E1 or E2 polypeptides, E1E2 complexes containing the modified E1 or E2 polypeptides, HCV containing the modified E1 or E2 polypeptides, or encoding nucleic acids thereof, also can be provided as kits. Kits can include one or more modified E1 or E2 polypeptides, E1E2 complexes containing the modified E1 or E2 polypeptides or HCV virions containing the modified E1 or E2 polypeptides. The kit can, optionally, include instructions for performing an assay, such as a neutralization assay. Also included in the kits can be, optionally, buffers, labels, dyes, tubes or microwell plates.

### E. EXAMPLES

[0410] The following examples are included for illustrative purposes only and are not intended to limit the scope of the invention.

### Example 1

### Materials and Methods

[0411] This Example describes some of the procedures and materials used in developing the invention.

[0412] Cells, Antibodies and Viruses.

[0413] Huh-7 (Zhong, J. et al. Proc. Natl. Acad. Sci. U.S.A. 102, 9294-9299 (2005)) and 293T cells were grown in Dulbecco's Modified Eagle Medium (D-MEM) supplemented with 10% fetal calf serum (FCS) (Invitrogen). The human MAbs CBH-2, CBH-5, CBH-4B and CBH-7, Mouse MAbs A4, H53, AP33, AP320 and ALP98, and rat MAbs 7/59, 9/27, 3/11, 1/39, 2/69A, 7/16B, 11/20, 9/75 and 6/53 have been described elsewhere. Keck, Z. Y. et al. J. Virol. 78, 9224-9232 (2004); Keck, Z. Y. et al. J. Virol. 81, 1043-1047 (2007); Keck, Z. Y. et al. J. Virol. 79, 13199-13208 (2005); Dubuisson, J. et al. J. Virol. 68, 6147-6160 (1994); Clayton, R. F. et al. J. Virol. 76, 7672-7682 (2002); Deleersnyder, V. et al. J. Virol, 71, 697-704 (1997); Owsianka, A. et al. J. Virol. 79, 11095-11104 (2005); Tarr, A. W. et al. Hepatology 43, 592-601 (2006); Flint, M. et al. J. Virol. 73, 6235-6244 (1999); Hsu, M. et al. Proc. Natl. Acad. Sci. U.S.A. 100, 7271-7276 (2003); Maruyama, T. et al. Am. J. Pathol. 165, 53-61 (2004). The panel of linear epitope-specific MAbs covers known linear regions. The generation of HCVpp has been described below.

[0414] Phage Display Antibody Library Construction.

[0415] In a study of autoantibodies in patients with Sjögren's syndrome, bone marrow mononuclear cell RNA from a 35-year-old female patient with Sjögren's syndrome and chronic HCV infection was used as source material for an IgG1 Fab phage display library (Maruyama, T. et al. Am. J. Pathol. 165, 53-61 (2004)). The donor was diagnosed with HCV in 1991 and developed mixed cryoglobulinemia, symptoms of Sjögren's syndrome and tested positive for antinuclear antibody in 1994. The donor was treated with interferon-α with initial decrease in viral load but the treatment was stopped due to severe drop in platelet count (idiopathic thrombocytopenic purpura). Bone marrow samples were collected for the evaluation of neutropenia as an outpatient clinical procedure at Scripps Clinic. After meeting the needs of clinical pathology, a fraction of the biopsy was used to construct the antibody library. The human subjects protocol was approved by the Human Subjects Committee for General Clinical Research Center of Scripps Clinic and informed consent was obtained from the donor. Due to subsequent relapse of HCV, the donor underwent a liver transplant in 2000 and has been maintained on anti-rejection medications since. The viral genotype in this donor was not determined at the time of tissue donation but was found to be genotype 1a seven years later. The bone marrow (˜2 ml) was separated by Histopaque-1077 gradient (Sigma-Aldrich) and RNA was extracted from mononuclear cells (7×10⁷ cells) homogenized in 10 mL of TRI reagent (Sigma-Aldrich). First-strand cDNA was synthesized using SuperScript First-Strand Synthesis Kit (Invitrogen), and the light chain and IgG1 heavy chain fragments were amplified by PCR using gene-specific primers and were sequentially cloned into the SacI/XbaI and XhoI/SpeI sites of a phagemid vector, pComb3H, as described previously (Maruyama, T. et al. J. Infect. Dis. 179 Suppl 1, S235-239 (1999)). The Fab heavy chains were expressed as a fusion protein with the phage gene III surface protein for display. The library was amplified in XL-1 Blue cells (Stratagene) using 0.3% SeaPrep agarose (BioWhittaker) in SuperBroth (SB) Medium by a semi-solid phase amplification method.

[0416] Library Panning on HCV E2 Glycoprotein

[0417] The phagemid library was transformed into E. coli (XL-1 Blue) (Stratagene) by electroporation and the phage was propagated overnight with VCS-M13 helper phage (Stratagene). Recombinant E2 glycoprotein (genotype 1a, amino acids 388-644; Lesniewski, R. et al. J. Med. Virol. 45, 415-422 (1995)) was coated directly onto a microtiter plate overnight at 4° C. (Costar). The wells were washed and then blocked with 4% non-fat dry milk in phosphate-buffered saline (PBS). The phage library was added to the wells and incubated for 1-2 hours at 37° C. and unbound phage washed away with PBS. Bound phage were eluted and used to infect freshly grown E. coli (XL1-Blue) (Stratagene) for titration on LB agar plates with carbenicillin. The phage libraries were panned for four consecutive rounds with increasing washing stringency.

[0418] Library Panning by an Epitope Masking Strategy.

[0419] In order to broaden the diversity of antibody specificities selected, library panning was repeated using recombinant E1E2 fused to glutathione S transferase (GST-E1E2; Chan-Fook, C. et al. Virology 273, 60-66 (2000)) pre-incubated with Fabs obtained above. GST-E1E2 was first captured with goat anti-GST antibody (Amersham Biosciences) and the wells were washed and blocked with 4% non-fat dry milk in PBS. Fabs obtained from the panning using E2 antigen above were added to the captured antigens to mask corresponding specific epitopes. The epitope-masked GST-E1E2 was used to pan the phage library as described above. It is important to note that, highly isolate-specific antibodies, e.g. those against HVR1, were not selected due to the use of heterologous antigens in panning.

[0420] Screening of Fab Displayed Phage.

[0421] Single individual colonies were isolated from titration plates after the 2nd, the 3rd, and the 4th round. The colonies were grown in SB medium with carbenicillin and tetracycline and Fab-phage production was induced with the addition of helper phage overnight at 30° C. The specificities of the Fab-phage were assessed by ELISA and the DNA sequences of the Fab-phage that bound with high specificity were determined. To produce soluble Fabs, the phage gene III surface protein in fusion with the Fab heavy chain was excised by restriction enzymes SpeI and NheI. The cut phagemids were self-ligated and transformed into XL1-Blue cells for the production of soluble Fabs by standard protocols. Barbas III, C. F., Burton, D. R., Scott, J. K. & Silverman, G. J. Phage Display: A Laboratory Manual, (Cold Spring Harbor Laboratory Press, New York, 2001).

[0422] Conversion of Fab into IgG1

[0423] The vectors pDR12 (Burton, D. R. et al. Science 266, 1024-1027 (1994)) and pIgG1 encoding the leader sequence and constant region of human IgG1 gene were used for the cloning and expression of full length IgG1. Vector pIgG1 is a derivative of pDR12 in which heavy and light chain cloning sites were altered to XhoI/BstEII and SacI/XbaI sites to facilitate direct cloning of the antibody gene fragments. For pDR12, the heavy and light chain genes of Fab C1 were amplified by PCR then inserted sequentially into the SacI/XbaI and HindIII/EcoRI sites of the vector (Burton, D. R. et al. Science 266, 1024-1027 (1994)). For pIgG1, the heavy and light chain gene fragments were excised from the phagemids and inserted sequentially into the XhoI/BstEII and SacI/XbaI sites of the vector. The recombinant plasmids were transfected into Chinese hamster ovarian (CHO) cells. Stable cell clones were established by selection with L-methionine sulfoxide (MSX) and by limiting dilution. Cell clones expressing high IgG levels were amplified and the IgGs were purified using a protein A-agarose column (Pharmacia).

[0424] ELISA. (i) To study the relative reactivity of Fabs to GST-E1E2 and E2, soluble Fabs were added to ELISA wells coated with soluble E2 (4 μg/mL), with GST-E1E2 (8 μg/mL) captured by pre-coated goat anti-GST-antibody (10 μg/mL), or with ovalbumin (4 μg/mL). Specific binding was detected by alkaline phosphatase (AP)-conjugated goat anti-human IgG F(ab′)₂ antibody (Pierce) (1:500) in 1% BSA/PBS and disodium p-nitrophenyl phosphate (Sigma). (ii) To study the relationship of different ARs to the mouse MAb epitope H53 (Cocquerel et al., J. J. Virol. 72, 2183-2191 (1998)), a saturating concentration of MAb H53 was added to vaccinia-expressed E1E2 (isolate HCV-1, obtained through the NIH AIDS Research and Reference Reagent Program: rVV E12 C/B from Chiron Corporation; Cooper, S. et al. Immunity 10, 439-449 (1999); Selby, M. et al. J. Immunol. 162, 669-676 (1999)) captured by pre-coated Galanthus nivalis lectin (5 μg/mL, Sigma) for 30 min before the addition of soluble Fabs (2 μg/mL). Non-fat milk (4%, BioRad) in PBS was used as a blocker in assays using lectin-captured antigens. The ELISA plates were washed after a 1 hour incubation and binding of human Fabs was detected by peroxidase (HRP)-conjugated goat anti-human IgG F(ab′)₂ antibody (1:2000) (Pierce) and TMB substrate (Pierce). The level of inhibition by MAb H53 was calculated as the % reduction of optical density signals produced by the human Fabs in the presence of H53. (iii) To study whether the MAbs recognized continuous or discontinuous epitopes, vaccinia-expressed E1E2 was either captured directly onto ELISA wells pre-coated with lectin (folded protein), or unfolded with 0.1% SDS, 50 mM DTT and incubated at 100° C. for 5 minutes before capture onto ELISA wells (unfolded protein). Binding of the MAbs to folded and unfolded proteins was detected using the peroxidase system. Mouse MAb A4 (Dubuisson, J. et al. J. Virol. 68, 6147-6160 (1994)), specific for a linear epitope in E1, was used as a positive control. (iv) To study the ability of MAb in inhibiting E1E2 binding to CD81, serially diluted MAbs (4-fold dilution from 10 μg/mL) were incubated with E1E2 (isolate H77) for 30 min before adding to ELISA wells pre-coated with the large extracellular loop of CD81 (CD81-LEL). After 1 hour incubation, the plates were washed and binding of E1E2 to CD81-LEL was detected with an anti-E1 mouse MAb A4 (Dubuisson, J. et al. J. Virol. 68, 6147-6160 (1994)), HRP-conjugated goat anti-mouse Fc antibody (Pierce) (1:2000) and TMB substrate. Two forms of recombinant CD81-LEL, either in fusion with glutathione S-transferase (GST) (Owsianka, A. M. et al. J. Virol. 80, 8695-8704 (2006)) or maltose binding protein (MBP) (Chan-Fook, C. et al. Virology 273, 60-66 (2000)), were used and the results were equivalent. (v) To study the apparent affinity of the MAbs, serially diluted MAbs (2-fold dilution from 20 μg/mL) were added to lectin-captured E1E2 antigens for 1 hour. E1E2 antigens were prepared from cell lysates from vaccinia-expressed HCV-1 E1E2, 293T cells transfected with H77 E1E2-expression plasmid (McKeating, J. A. et al. J. Virol. 78, 8496-8505 (2004)). The binding of human MAbs was detected by HRP-conjugated goat anti-human IgG F(ab′)₂ antibody as above. Non-infected/non-transfected cell lysate were used as negative controls to determine background for each MAb. Apparent affinity was defined by the concentration of MAbs that produced half of the maximal specific binding in the titration curves. (vi) To construct the MAb competition matrix, saturating concentrations of blocking MAbs (typically at 20 μg/mL or undiluted hybridoma supernatants) were added to lectin-captured vaccinia-expressed HCV-1 E1E2 for 30 minutes before the addition of an equal volume of biotinylated human MAbs (2 μg/mL). The E1E2 antigens were titrated to ensure that saturating concentrations of the blocking MAbs were used in the assays. It is important to note that, MAbs recognizing linear epitopes bind to both folded and unfolded proteins but the biotinylated human MAbs bind conformational epitopes on folded E2. Consequently, competition is performed with the MAbs to linear epitopes as blocking MAbs to eliminate potential non-specific signals caused by misfolded proteins in the system. After incubation for 1 h, the ELISA plates were washed and binding of biotinylated MAbs was detected with HRP-conjugated streptavidin (1:2000, Sigma-Aldrich) in PBS with 1% BSA and TMB substrate (Pierce). Competition was determined by the % change in binding signals in the presence of the blocking antibodies. (vii) To study the effect of alanine substitution in E2 on MAb binding, E1E2 mutant antigens were produced by transfection of 293T cells with the corresponding expression plasmids and the antigens in clarified cell lysate were captured by lectin as above. A panel of 38 H77 E1E2 mutants having the conserved residues in the putative CD81 binding pocket substituted with alanine was used in this study (Owsianka, A. M. et al. J. Virol. 80, 8695-8704 (2006)). The binding signals of the human MAbs to the alanine mutants were compared to the wildtype H77 E1E2 to determine the importance of the residues in the antibody-antigen interaction. (viii) To quantify human IgG in mouse serum, diluted mouse sera in triplicate were added to ELISA wells coated with human goat anti-human IgG F(ab)′₂ (10 μg/mL, Pierce) for 1 hour and bound human IgG was detected with AP-conjugated goat anti-human F(ab)′₂ (10 μg/mL) (Pierce). Serially diluted MAb AR3A (2-fold dilution starting from 4 g/mL) was used to construct a standard curve in each ELISA plate. The concentration of human IgG in each serum sample was calculated from the 4-parameter fitted standard curve using SOFTmax Pro Software (Molecular Devices).

[0425] HCV neutralization assays. The neutralization assays were performed in Dulbecco's Modified Eagle Medium (D-MEM) supplemented with 10% fetal calf serum (FCS) (Invitrogen). For HCVpp neutralization, HCVpp was generated by co-transfection of 293T cells with pNL4-3.lucR-E- (Connor et al., Virology 206, 935-944 (1995); He, J. et al. J. Virol. 69, 6705-6711 (1995)) and the corresponding expression plasmids encoding the E1E2 genes at 4:1 ratio by polyethylenimine (Boussif, O. et al. Proc. Natl. Acad. Sci. U.S.A. 92, 7297-7301 (1995)). Virus infectivity was detected using the firefly luciferase assay system (Promega). Background infectivity of the pseudotype virus was determined using cells transfected with pNL4-3.lucR-E-only. The E1E2 expression plasmids for the isolates H77, H, CH35, OH8, UKN1B12.16, J6, UKN2A1.2, UKN2B1.1, UKN3A13.6, UKN3A1.28c, UKN4.21.16, UKN5.15.7 and UKN6.5.8 have been described previously (Owsianka, A. et al. J. Virol. 79, 11095-11104 (2005); McKeating, J. A. et al. J. Virol. 78, 8496-8505 (2004); Lavillette, D. et al. Hepatology 41, 265-274 (2005)). The expression plasmids encoding E1E2 of the virus in an infected human serum (KP) used in the protection experiment are described below. The majority of HCV Envs, except H77, H and OH8, produce only low levels of HCVpp (<5,000 Relative Light Unit, RLU). To ensure the quality of data for determining virus neutralization, 1 HCVpp of low infectivity was concentrated 10-20 fold by centrifugation at 38,000×g for 1 hour. Serially diluted antibodies were first incubated with the virus for 1 hour at 37° C. before adding to Huh-7 cells in triplicate and the cells were incubated for 3 days. After background subtraction, virus neutralization was determined by the % change of RLU in the presence of antibodies. Virus concentration did not affect the neutralization of the prototype HCVpp-H77 by the MAbs in comparison to unconcentrated virus (data not shown). Although virus concentration improved the signals of several HCV Envs, consistent signals were not obtained with HCVpp displaying CH35, UKN3A1.28c, UKN6.5.8 or KP E1E2 in repeated experiments and these Envs were excluded in the analysis.

[0426] Cloning of E1E2 from an Infected Human Serum.

[0427] Total RNA in the HCV GT1a-infected human serum KP (140 μl) was purified using a QIAamp Viral RNA Mini Kit (Qiagen). First strand cDNA was generated using either a reverse primer specific to HCV1a (HCV1aOuterR, GGGATGCTGCATTGAGTA, (SEQ ID NO: 697); Lavillette, D. et al. Hepatology 41, 265-274 (2005)) or random hexamer using the SuperScript III reverse transcriptase (Invitrogen). The GT1a E1 E2 genes were amplified by a nested PCR as described previously (Lavillette, D. et al. Hepatology 41, 265-274 (2005)) and the PCR products were cloned using the pcDNA3.1/V5-His TOPO TA Expression Kit (Invitrogen). An HIV-positive human serum was used as a negative control throughout the experiments and no non-specific product was generated. The sequences of 40 clones were determined by DNA sequencing and analyzed using VectorNTI software (Invitrogen). Expression of E1E2 proteins was confirmed by the presence of folded E2 proteins in cell lysates, prepared from 293T cells transfected with the corresponding DNA plasmids, by ELISA using MAb AR3A.

[0428] Antibody Protection Studies.

[0429] Human liver-chimeric mice were prepared as described previously. Mercer, D. F. et al. Nat. Med. 7, 927-933 (2001); Kneteman, N. M. et al. Hepatology 43, 1346-1353 (2006). The animal experiments were approved by the University of Alberta Animal Care and Use Committee for Health Sciences. All human liver biopsies and sera were collected under informed consent and the human subjects protocols were approved by the University of Alberta Health Research Ethics Board (Biomedical Panel). Colonization of human hepatocytes in the livers of Alb-uPA/SCID mice was confirmed by the presence of human alpha-1-anti-trypsin (hAAT) in the mice. Only mice with serum levels of hAAT greater than 60 μg/mL at 6 weeks and 100 μg/mL at 8 weeks, an indication for successful transplantation, were used in the protection study (˜50% of transplanted mice). Mice with low level of human liver chimerism were used in preliminary experiments to measure the toxicity and kinetics of MAbs in Alb-uPA/SCID mice, and the level of human IgG present in mice injected with a genotype 1a HCV-infected human serum KP. This serum, serially diluted from 1:50 to 1:4050, did not neutralize HCVpp-H77 (data not shown). Different doses of MAbs, at 10 mg/mL, were injected into the mice via the intraperitoneal route. For virus challenge, the experiments were conducted in blinded fashion; the identity of the MAbs was not provided to the technicians performing the animal procedures and HCV RNA tests. Human liver-chimeric mice were given MAbs by intraperitoneal injection (200 mg/kg) 24 hours before virus challenge. Mice were anaesthetized and injected intrajugularly with 100 μL of infected serum KP (2.3×10⁶ IU/mL). Blood was sampled by tail bleed and sera were prepared by centrifugation of clotted blood for ELISA and viral load measurement.

[0430] HCV RNA Quantification.

[0431] HCV RNA in mouse serum was quantified by a real-time TaqMan PCR assay. The two primers in the real-time PCR system were designed to produce a 194 bp PCR fragment corresponding to the 5′ non-coding region with maximum specificity to all HCV genotypes. The forward primer (T-149-F, 5′-TGCGGAACCGGTGAGTACA, (SEQ ID NO: 698) and reverse primer (T-342-R, 5′-AGGTTTAGGATTCGTGCTCAT, (SEQ ID NO: 699) were designed with the aid of software Primer Express (PE biosystems) and were purchased from PE Applied Biosystems. To quantify HCV RNA, total RNA in serum was isolated by the guanidinium thiocyanate (GuSCN) and silico method (Boom, R. et al. J. Clin. Microbiol. 28, 495-503 (1990)). Briefly, 30 μL of serum was mixed with 500 μl GuSCN lysis buffer and 20 μl, size-fractionated silica particles for 15 minutes. The silica particles were pelleted and washed twice with 500 μL washing buffer, twice with 70% ethanol and once with acetone. The pellet was dried for 10 min on a heat block, and RNA was eluted in 20 μL distilled water and quantified by optical density. SuperScript II First-Strand Synthesis Kit (Invitrogen) was used to synthesize first-strand cDNA for PCR. Five μL of the serum RNA was mixed with 100 μM of SuperScript II reverse transcriptase, 20 μM of RNAseOut and 14 μL reaction cocktail (which includes 1× first-strand buffer, 5 μM DTT, 375 nM dNTP, 1.25 μM T-342-R primer) and incubated at 42° C. for 60 min then 70° C. for 15 minutes. For quantitative PCR, a 50 μL mixture contained 9 μL of template HCV cDNA, 1×TaqMan Universal PCR Master Mixture (Applied Biosystems Inc.), 375 nM dNTP, 400 nM of T-149-F and T-342-R primers and 200 nM TaqMan probe (6-FAM18 CACCCTATCAGGCAGTACCACAAGGCC-TAMRA, (SEQ ID NO: 700). Thermocycling was performed on a Taqman 7300 (Applied Biosystems Inc.) using the default setting program recommended by the manufacturer: 50° C. for 2 min, 95° C. for 10 min, and 45 cycles of 95° C. for 15 s and 60° C. for 60 s. A serial dilution of HCV cDNA, including 1.5×10⁶, 1.5×10⁵, 1.5×10⁴, 1.5×10³, 1.5×10², 1.5×10¹, 1.5×10⁰ IU, was used to generate a standard curve for calculation of HCV RNA copy number. The dynamic range of HCV RNA detection for the two step RT-PCR procedure is 6.0×10² IU/ml to 3.0×10⁸ IU/mL. Each assay run incorporates in duplicate a negative control and an HCV RNA positive control. The positive control is the OptiQual HCV RNA 1 Control purchased from AcroMetrix which has been calibrated to the WHO first International Standard for HCV RNA.

[0432] Statistical Analysis.

[0433] GraphPad Prism 4 software was used for statistical analysis of the antibody protection experiment. Animals seropositive for HCV RNA by the quantitative PCR assay at or after day 7 post-infection were scored as “infected” subjects and animals seronegative up to week 6 were scored as “censored” subjects. The scores were used to construct the Kaplan-Meier survival (infection in this case) curves to calculate statistical significance between the neutralizing antibody-treated and isotype antibody control groups by a two-tailed log rank test within the experimental period. Motulsky, H. Survival curves. in GraphPad Prism4 Statistics Guide: Statistical analyses for laboratory and clinical researchers 107-117 (GraphPad Software, San Diego, 2005).

### Example 2

### Anti-HCV Neutralizing Antibodies

[0434] This Example describes the identification of human monoclonal antibodies (mAbs) that neutralize genetically diverse HCV isolates and protect against heterologous HCV quasispecies challenge in a human liver-chimeric mouse model. The results provide evidence that broadly neutralizing antibodies to HCV protect against heterologous viral infection and suggest that a prophylactic vaccine against HCV may be achievable.

[0435] A total of 115 clones that exhibit specific binding to HCV E2 glycoprotein were isolated from an antibody antigen-binding fragment (Fab) phage display library generated from a donor chronically infected with HCV (see Example 1). DNA sequence analysis identified 36 distinct Fabs with 13 unique heavy chain sequences. The sequences of the 36 distinct Fabs belonging to 13 groups based on the heavy chain sequences are also shown in Table 10 below. Table 9 sets forth the sequence of the HCDR3. Fabs with the same designation and * or ** have the same heavy chain but distinct light chains, e.g. H1, H1* and H1** have the same heavy chain, but 3 different light chains.

TABLE 9
Fab HCDR3 Sequences

| | | Isolated | |
|---|---|---|---|
| | | by | |
| | | masking | |
| | Fab | with Fab | HCDR3 sequence |
| 1 | A | | ENKFRYCRGGSCYSGAFDM |
| | | | (SEQ ID NO: 140) |
| 2 | B1 | | DPYVYAGDDVWSLSR (SEQ ID NO: 141) |
| 3 | B2 | | DPYVYAGDDVRSLSR (SEQ ID NO: 142) |
| 4 | B3 | | DPYVYAGDDVWSLSR (SEQ ID NO: 143) |
| 5 | C1 | | PETPRYCSGGFCYGEFDN |
| | | | (SEQ ID NO: 144) |
| 6 | C1* | B1 | PETPRYCSGGFCYGEFDN |
| | | | (SEQ ID NO: 144) |
| 7 | C2 | B1 | PETPRYCRGGFCYGEFDN |
| | | | (SEQ ID NO: 145) |
| 8 | C2* | B1 | PETPRYCRGGFCYGEFDN |
| | | | (SEQ ID NO: 145) |
| 9 | C3 | B1 | PETPRYCSGGVCYGEFDN |
| | | | (SEQ ID NO: 146) |
| 10 | C4 | B1 | PETPRYCSGGFCYGEFDN |
| | | | (SEQ ID NO: 147) |
| 11 | C5 | B1 | PETPRYCSGGFCYGEFDN |
| | | | (SEQ ID NO: 148) |
| 12 | C6 | B1 | PETPRYCSGGFCYGEFDN |
| | | | (SEQ ID NO: 149) |
| 13 | D1 | C1 | DPLLFAGGPNWFDH (SEQ ID NO: 150) |
| 14 | D2 | C1 | DPLLFAGGPNWFDH (SEQ ID NO: 151) |
| 15 | D3 | C1, B1 & | DPLLFAGGPNWFDH (SEQ ID NO: 152) |
| | | C1 | |
| 16 | D4 | B1 & C1 | DPLLFAGGPNWFDH (SEQ ID NO: 153) |
| 17 | E | C1 | GPYVGLGEGFSE (SEQ ID NO: 154) |
| 18 | F | B1 & C1 | GGGTE (SEQ ID NO: 155) |
| 19 | G | B1 & C1 | DRGLAINGVVFPYFGLDV |
| | | | (SEQ ID NO: 156) |
| 20 | H1 | B1 | SVTPRHCGGGFCYGEFDY |
| | | | (SEQ ID NO: 157) |
| 21 | H1* | B1 | SVTPRHCGGGFCYGEFDY |
| | | | (SEQ ID NO: 157) |
| 22 | H1** | B1 | SVTPRHCGGGFCYGEFDY |
| | | | (SEQ ID NO: 157) |
| 23 | H2 | B1 | SVTPRHCGGGFCYGEFDY |
| | | | (SEQ ID NO: 158) |
| 24 | H3 | B1 | SVTPRYCGGGFCYGEFDY |
| | | | (SEQ ID NO: 159) |
| 25 | I | B1 | PHGPGLSLGIYSAEYFDE |
| | | | (SEQ ID NO: 160) |
| 26 | J1 | B1 | VGVRGIILVGGLAMNWLDP |
| | | | (SEQ ID NO: 161) |
| 27 | J2 | B1 | VGLRGIVMVGGLAMNWLDP |
| | | | (SEQ ID NO: 162) |
| 28 | J3 | B1 | VGLRGITLVGGLAMNWLDP |
| | | | (SEQ ID NO: 163) |
| 29 | J3* | B1 | VGLRGITLVGGLAMNWLDP |
| | | | (SEQ ID NO: 163) |
| 30 | J4 | B1 | VGLRGINMVGGLAMNWFDP |
| | | | (SEQ ID NO: 164) |
| 31 | K | B1 & C1 | DFYIGPTRDVYYGMDV (SEQ ID NO: 165) |
| 32 | L1 | B1 | AGDLSVGGVLAGGVPHLRHFDP |
| | | | (SEQ ID NO: 166) |
| 33 | L2 | B1 | AGDLSVGGVLAGGVPHLRHFDP |
| | | | (SEQ ID NO: 167) |
| 34 | L3 | B1 | AGDLSVGGVLAGGVPHLRHFDP |
| | | | (SEQ ID NO: 168) |
| 35 | L4 | B1 | AGDLSVGGVLAGGVPHLRHFDP |
| | | | (SEQ ID NO: 169) |
| 36 | M | B1 | ESLYMIAFGRVIWPPLDY |
| | | | (SEQ ID NO: 170) |

TABLE 10A
Anti-HCV E2 Fabs (IgGκ, heavy chain)

| | | |
|---|---|---|
| Fab | FRAMEWORK 1 | CDR1 |

| | | | |
|---|---|---|---|
| 1 | A | LEQSGAEVKKPGSSVKVSCKASGGTFS (SEQ ID NO: 309) | SFVIN (SEQ ID NO: 78) |
| 2 | B1 | LEQSGAEVKKPGSSVKVSCRASGSPFS (SEQ ID NO: 310) | SYTIT (SEQ ID NO: 79) |
| 3 | B2 | LEQSGAEVKKPGSSVKVSCRASGSPYS (SEQ ID NO: 311) | SYTIT (SEQ ID NO: 80) |
| 4 | B3 | LEQSGAEVKKPGSSVKVSCRASGSPYS (SEQ ID NO: 312) | SYTIT (SEQ ID NO: 81) |
| 5 | C1 | LEQSGAEVKTPGSSVRVSCRPPGGNFN (SEQ ID NO: 313) | SYSIN (SEQ ID NO: 82) |
| 6 | C1* | LEQSGAEVKTPGSSVRVSCRPPGGNFN (SEQ ID NO: 313) | SYSIN (SEQ ID NO: 82) |
| 7 | C2 | LEQSGAEVKKPGSSVRVSCRAPGGTFN (SEQ ID NO: 314) | SYSVN (SEQ ID NO: 83) |
| 8 | C2* | LEQSGAEVKKPGSSVRVSCRAPGGTFN (SEQ ID NO: 314) | SYSVN (SEQ ID NO: 83) |
| 9 | C3 | LEQSGAEVKEPGSSVRVSCRAPGGTFN (SEQ ID NO: 315) | SYSIN (SEQ ID NO: 84) |
| 10 | C4 | LEQSGAEVKKPGSSVRVSCRPPGGTFN (SEQ ID NO: 316) | SYSIN (SEQ ID NO: 85) |
| 11 | C5 | LEQSGAEVKKPGSSVRVSCRAPGGTLN (SEQ ID NO: 317) | SYSIN (SEQ ID NO: 86) |
| 12 | C6 | LEQSGAEVKKPGSSVRVSCRPPGGTFN (SEQ ID NO: 318) | SYSIN (SEQ ID NO: 87) |
| 13 | D1 | LE SGGGLVQPGGSLRLSCEASGYYFS (SEQ ID NO: 319) | SFAMS (SEQ ID NO: 88) |
| 14 | D2 | LEQSGGGLVQPGGSLRLSCEASGYYFS (SEQ ID NO: 320) | SFAMS (SEQ ID NO: 89) |
| 15 | D3 | LE SGGGLVQPGGSLRLSCEASGYYFS (SEQ ID NO: 321) | SFAMS (SEQ ID NO: 90) |
| 16 | D4 | LE SGGGLVQPGGSLRLSCEASGYYFS (SEQ ID NO: 322) | SFAMS (SEQ ID NO: 91) |
| 17 | E | LEQSGAELKKPGSSVKVSCKPSDGTFR (SEQ ID NO: 323) | AYTLS (SEQ ID NO: 92) |
| 18 | F | LEQSGNEVKKPGASVKVSCRAYGYNFG (SEQ ID NO: 324) | SERLS (SEQ ID NO: 93) |
| 19 | G | LEQSGAEMKKPGASLKVSCKTSGYTFD (SEQ ID NO: 325) | DYGVT (SEQ ID NO: 94) |
| 20 | H1 | LEQSGAEVKKPGSSVKVSCEASGGTFD (SEQ ID NO 326) | NYSLN (SEQ ID NO 95) |
| 21 | H1* | LEQSGAEVKKPGSSVKVSCEASGGTFD (SEQ ID NO: 326) | NYSLN (SEQ ID NO: 95) |
| 22 | H1** | LEQSGAEVKKPGSSVKVSCEASGGTFD (SEQ ID NO: 326) | NYSLN (SEQ ID NO: 95) |
| 23 | H2 | LEQSGAEVKKPGSSVKVSCETSGGTFD (SEQ ID NO: 327) | NYALN (SEQ ID NO: 96) |
| 24 | H3 | LEQSGAEVKKPGSSVKVSCETSGGTLD (SEQ ID NO: 328) | NYALN (SEQ ID NO: 97) |
| 25 | I | LE SGGGLVQPGRSLRLSCKASGFNFA (SEQ ID NO: 329) | QYTMN (SEQ ID NO: 98) |
| 26 | J1 | LEQSGPEVKKPGSSVKVSCKGSGDRFN (SEQ ID NO: 330) | DPVT (SEQ ID NO: 99) |
| 27 | J2 | LEQSGPEVKKPGSSVKVSCKDSGDTFN (SEQ ID NO: 331) | EPVT (SEQ ID NO: 100) |
| 28 | J3 | LEQSGPEVKKPGSSVKVSCKGSGDTFN (SEQ ID NO: 332) | DPVT (SEQ ID NO: 101) |
| 29 | J3* | LEQSGPEVKKPGSSVKVSCKGSGDTFN (SEQ ID NO: 332) | DPVT (SEQ ID NO: 101) |
| 30 | J4 | LEQSGAEVKKPGSSVRVSCEVSGDTFR (SEQ ID NO: 333) | EPVS (SEQ ID NO: 102) |
| 31 | K | LEQSGPGLVKPGRPFSLTCAISGDSVS (SEQ ID NO: 334) | SDSAAWN (SEQ ID NO: 103) |
| 32 | L1 | LEQSGAEVKKPGSSVKVSCKASGDTFR (SEQ ID NO: 335) | SYVIT (SEQ ID NO: 104) |
| 33 | L2 | LEQSGAEVKMPGSSVKVSCKASGDTFR (SEQ ID NO: 336) | SSVIT (SEQ ID NO: 105) |
| 34 | L3 | LEQSGAEVKKPGSSVKVSCKASGDTFR (SEQ ID NO: 337) | SYVIT (SEQ ID NO: 106) |
| 35 | L4 | LEQSGAEVKKPGSSVKVSCKASGDTFR (SEQ ID NO: 338) | SYVIT (SEQ ID NO: 107) |
| 36 | M | LEQSGAEVKKPGASVKVSCKASGYTFT (SEQ ID NO: 339) | NYAIT (SEQ ID NO: 108) |

TABLE 10B
Anti-HCV E2 Fabs (IgGκ, heavy chain)

| | | |
|---|---|---|
| Fab | FRAMEWORK 2 | CDR2 |

| | | |
|---|---|---|
| A | WVRQAPGQGLEWVG (SEQ ID NO: 340) | GIFQAPGPEREWLRDINPISGTINYAQRFQG (SEQ ID |
| | | NO: 109) |
| B1 | WVRQAPGQGLEWMG (SEQ ID NO: 341) | GIILMTGKANYAQKFQG (SEQ ID NO: 110) |
| B2 | WVRQAPGQGLEWMG (SEQ ID NO: 342) | GIILMTGKANYAQKFQG (SEQ ID NO: 111) |
| B3 | WVRQAPGQGLEWMG (SEQ ID NO: 343) | GIILMTGKANYAQKFQG (SEQ ID NO: 112) |
| C1 | WVRQAPGHGLEWVG (SEQ ID NO: 344) | TFIPMFGTSKYAQKFQG (SEQ ID NO: 113) |
| C1* | WVRQAPGHGLEWVG (SEQ ID NO: 344) | TFIPMFGTSKYAQKFQG (SEQ ID NO: 113) |
| C2 | WVRQAPGHGLEWVG (SEQ ID NO: 345) | TLIPMFGTSSYAQKFQG (SEQ ID NO: 114) |
| C2* | WVRQAPGHGLEWVG (SEQ ID NO: 345) | TLIPMFGTSSYAQKFQG (SEQ ID NO: 114) |
| C3 | WVRQAPGHGLEWVG (SEQ ID NO: 346) | TLIPMFGTSNYAQKFQG (SEQ ID NO: 115) |
| C4 | WVRQAPGHGLEWVG (SEQ ID NO: 347) | TLIPMFGTSKYAQKLQG (SEQ ID NO: 116) |
| C5 | WVRQAPGHGLEWVG (SEQ ID NO: 348) | TLIPMFGTSNYAQKFQG (SEQ ID NO: 117) |
| C6 | WVRQAPGHGLEWVG (SEQ ID NO: 349) | TIIPMFGTSKYAQKLQG (SEQ ID NO: 118) |
| D1 | WVRQTPGKGLEWVS (SEQ ID NO: 350) | SIAGGTLGRTSYRDSVKG (SEQ ID NO: 119) |
| D2 | WVRQTPGKGLEWVS (SEQ ID NO: 351) | SIAGGTLGRTSYRDSVKG (SEQ ID NO: 120) |
| D3 | WVRQTPGKGLEWVS (SEQ ID NO: 352) | SIAGGTLGRTSYRDSVKG (SEQ ID NO: 121) |
| D4 | WVRQTPGKGLEWVS (SEQ ID NO: 353) | SIAGGTLGRTSYRDSVKG (SEQ ID NO: 122) |
| E | WVRQAPGQTLEWMG (SEQ ID NO: 354) | RIMPTVGITNYAQKFQG (SEQ ID NO: 123) |
| F | WVRQAPGQGLEWMG (SEQ ID NO: 355) | WISAYNGGINYSQKFQG (SEQ ID NO: 124) |
| G | WVRQAPGQGLEWMG (SEQ ID NO: 356) | WISAYSGNTFYARKFQG (SEQ ID NO: 125) |
| H1 | WVRQAPGQGLEWIG (SEQ ID NO: 357) | GVVPLFGTTKYAQKFQG (SEQ ID NO: 126) |
| H1* | WVRQAPGQGLEWIG (SEQ ID NO: 357) | GVVPLFGTTKYAQKFQG (SEQ ID NO: 126) |
| H1** | WVRQAPGQGLEWIG (SEQ ID NO: 357) | GVVPLFGTTKYAQKFQG (SEQ ID NO: 126) |
| H2 | WVRQAPGQGLEWIG (SEQ ID NO: 358) | GVVPLFGTTKYAQKFQG (SEQ ID NO: 127) |
| H3 | WVRQAPGQGLEWIG (SEQ ID NO: 359) | GVVPLFGTTRNAQKFQG (SEQ ID NO: 128) |
| I | WVRQAPGKGLEWIG (SEQ ID NO: 360) | LIRTTAYDAATHYAASVEG (SEQ ID NO: 129) |
| J1 | WVRQAPGQGLEWIG (SEQ ID NO: 361) | GIIPAFGATKYAQKFQG (SEQ ID NO: 130) |
| J2 | WVRQAPGQGLEWIG (SEQ ID NO: 362) | GIIPAFGVTKYAQKFQG (SEQ ID NO: 131) |
| J3 | WVRQAPGQGLEWIG (SEQ ID NO: 363) | GIIPLFGAAKYAQKFQG (SEQ ID NO: 132) |
| J3* | WVRQAPGQGLEWIG (SEQ ID NO: 363) | GIIPLFGAAKYAQKFQG (SEQ ID NO: 132) |
| J4 | WVRQAPGQGFEWIG (SEQ ID NO: 364) | GIIPMFGATHYAQKLQG (SEQ ID NO: 133) |
| K | WVRQSPSRGLEWLG (SEQ ID NO: 365) | RTFYRSKWYYDYTVSVKS (SEQ ID NO: 134) |
| L1 | WARQAPGQGLEWMG (SEQ ID NO: 366) | AIIPFFGTTNLAQKFQG (SEQ ID NO: 135) |
| L2 | WARQAPGQGLEWMG (SEQ ID NO: 367) | AIIPFFGTTNLAQKFQG (SEQ ID NO: 136) |
| L3 | WARQAPGQGLEWMG (SEQ ID NO: 368) | AIIPFFGTTNLAQKFQG (SEQ ID NO: 137) |
| L4 | WARQAPGQGLEWMG (SEQ ID NO: 369) | AIIPFFGTTNLAQKFQG (SEQ ID NO: 138) |
| M | WVRQAPGQGLEWMG (SEQ ID NO: 370) | WISGDSTNTYYGQKFQG (SEQ ID NO: 139) |

TABLE 10C
Anti-HCV E2 Fabs (IgGκ, heavy chain)

| | | | |
|---|---|---|---|
| Fab | FRAMEWORK3 | CDR3 | FRAMEWORK4 |

| | | | |
|---|---|---|---|
| A | RVTMTADESMTTVYMELSSLRSEDTAMYYCAR | ENKFRYCRGGSCYSGAFDM | WGQGTMVTVSSAS |
| | (SEQ ID NO: 371) | (SEQ ID NO: 140) | (SEQ ID NO: 402) |
| B1 | RVTITADRSTTTAYMEMSSLTSDDTAIYYCAR | DPYVYAGDDVWSLSR | WGQGTLVIVSSAS |
| | (SEQ ID NO: 372) | (SEQ ID NO: 141) | (SEQ ID NO: 403) |
| B2 | RVTITADRATATAYMEMSSLTSDDTAIYYCAR | DPYVYAGDDVRSLSR | WGQGTPVIVSSAS |
| | (SEQ ID NO: 373) | (SEQ ID NO: 142) | (SEQ ID NO: 404) |
| B3 | RVTITADRATATAYMEMSSLTSDDTAIYYCAR | DPYVYAGDDVWSLSR | WGQGTPVIVSSAS |
| | (SEQ ID NO: 374) | (SEQ ID NO: 143) | (SEQ ID NO: 405) |
| C1 | RVTITADGSSGTAYMDLNSLRSDDTAFYYCVR | PETPRYCSGGFCYGEFDN | WGQGTLVTVSSAS |
| | (SEQ ID NO: 375) | (SEQ ID NO: 144) | (SEQ ID NO: 406) |
| C1* | RVTITADGSSGTAYMDLNSLRSDDTAFYYCVR | PETPRYCSGGFCYGEFDN | WGQGTLVTVSSAS |
| | (SEQ ID NO: 375) | (SEQ ID NO: 144) | (SEQ ID NO: 406) |
| C2 | RVTITADGSSGTAYMELNSLRSDDTAVYYCVR | PETPRYCRGGFCYGEFDN | WGQGTLVTVSSAS |
| | (SEQ ID NO: 376) | (SEQ ID NO: 145) | (SEQ ID NO: 407) |
| C2* | RVTITADGSSGTAYMELNSLRSDDTAVYYCVR | PETPRYCRGGFCYGEFDN | WGQGTLVTVSSAS |
| | (SEQ ID NO: 376) | (SEQ ID NO: 145) | (SEQ ID NO: 407) |
| C3 | RVTITADGSSGTAYMELNSLRSDDTAVYYCVR | PETPRYCSGGVCYGEFDN | WGQGTLVTVSSAS |
| | (SEQ ID NO: 377) | (SEQ ID NO: 146) | (SEQ ID NO: 408) |
| C4 | RVTITADGSSGTAYMELNSLRSDDTAVYYCVR | PETPRYCSGGFCYGEFDN | WGQGTLVTVSSAS |
| | (SEQ ID NO: 378) | (SEQ ID NO: 147) | (SEQ ID NO: 409) |
| C5 | RVTITADGSSGTAYMELNSLRSDDTAVYYCVR | PETPRYCSGGFCYGEFDN | WGQGTLVTVSSAS |
| | (SEQ ID NO: 379) | (SEQ ID NO: 148) | (SEQ ID NO: 410) |
| C6 | RVTITADGSSGTAYMELNSLRSDDTAVYYCVR | PETPRYCSGGFCYGEFDN | WGQGTLVTVSSAS |
| | (SEQ ID NO: 380) | (SEQ ID NO: 149) | (SEQ ID NO: 411) |
| D1 | RFTISRDNSKNTVFLHMNNLRPEDTAVYYCAK | DPLLFAGGPNWFDH | WGQGTLVTVSSAS |
| | (SEQ ID NO: 381) | (SEQ ID NO: 150) | (SEQ ID NO: 412) |
| D2 | RFTISRDNSKNTVFLHMNNLRPEDTAVYYCAK | DPLLFAGGPNWFDH | WGQGTLVTVSSAS |
| | (SEQ ID NO: 382) | (SEQ ID NO: 151) | (SEQ ID NO: 413) |
| D3 | RFTISRDNSKNTMFLHMNNLRPEDTAVYYCAK | DPLLFAGGPNWFDH | WGQGTLVTVSSAS |
| | (SEQ ID NO: 383) | (SEQ ID NO: 152) | (SEQ ID NO: 414) |
| D4 | RFTISRDNSKNTVFLHMSNLRPEDTAVYYCAK | DPLLFAGGPNWFDH | WGQGTLVTVSSAS |
| | (SEQ ID NO: 384) | (SEQ ID NO: 153) | (SEQ ID NO: 415) |
| E | RVTISADMSTATAYMELSSLRSDDTAIYYCAK | GPYVGLGEGFSE | WGQGTLVTVSSAS |
| | (SEQ ID NO: 385) | (SEQ ID NO: 154) | (SEQ ID NO: 416) |
| F | RFTMTTDTSTRTGYMELRNLRSDDTAVYYCAR | GGGTE | WGQGTLVIVSSDE |
| | (SEQ ID NO: 386) | (SEQ ID NO: 155) | (SEQ ID NO: 417) |
| G | RVTMTTDPSTRTAYMELRSLRSDDTAVYFCAR | DRGLAINGVVFPYFGLDV | WGQGTTVTVSSAS |
| | (SEQ ID NO: 387) | (SEQ ID NO: 156) | (SEQ ID NO: 418) |
| H1 | RVTISDDKSTGTGHMELRSLRSEDTAVYYCVR | SVTPRHCGGGFCYGEFDY | WGQGTLVTVSSAS |
| | (SEQ ID NO: 388) | (SEQ ID NO: 157) | (SEQ ID NO: 419) |
| H1* | RVTISDDKSTGTGHMELRSLRSEDTAVYYCVR | SVTPRHCGGGFCYGEFDY | WGQGTLVTVSSAS |
| | (SEQ ID NO: 388) | (SEQ ID NO: 157) | (SEQ ID NO: 419) |
| H1** | RVTISDDKSTGTGHMELRSLRSEDTAVYYCVR | SVTPRHCGGGFCYGEFDY | WGQGTLVTVSSAS |
| | (SEQ ID NO: 388) | (SEQ ID NO: 157) | (SEQ ID NO: 419) |
| H2 | RVTISDDKSTGTGHMELRSLRSEDTAVYYCVR | SVTPRHCGGGFCYGEFDY | WGQGTLVTVSSAS |
| | (SEQ ID NO: 389) | (SEQ ID NO: 158) | (SEQ ID NO: 420) |
| H3 | RVTISDDKSTGTGHMELRSLRSEDTAVYYCVR | SVTPRYCGGGFCYGEFDY | WGQGTLVTVSSAS |
| | (SEQ ID NO: 390) | (SEQ ID NO: 159) | (SEQ ID NO: 421) |
| I | RFTISRDDSKSTAYLQINGLKTEDTAVYYCAR | PHGPGLSLGIYSAEYFDE | WGQGTLVTVSSAS |
| | (SEQ ID NO: 391) | (SEQ ID NO: 160) | (SEQ ID NO: 422) |
| J1 | RVVISADASTDTAYMELSSLRSEDTAVYYCAK | VGVRGIILVGGLAMNWLDP | WGQGTLVTVSAAS |
| | (SEQ ID NO: 392) | (SEQ ID NO: 161) | (SEQ ID NO: 423) |
| J2 | RVIISADASTATAYLELSSLRSEDTAVYYCAK | VGLRGIVMVGGLAMNWLDP | WGQGTQVTVSSAS |
| | (SEQ ID NO: 393) | (SEQ ID NO: 162) | (SEQ ID NO: 424) |
| J3 | RVTISADASALTTYMELSSLRPEDTAVYYCAK | VGLRGITLVGGLAMNWLDP | WGQGTLITVSSAS |
| | (SEQ ID NO: 394) | (SEQ ID NO: 163) | (SEQ ID NO: 425) |
| J3* | RVTISADASALTTYMELSSLRPEDTAVYYCAK | VGLRGITLVGGLAMNWLDP | WGQGTLITVSSAS |
| | (SEQ ID NO: 394) | (SEQ ID NO: 163) | (SEQ ID NO: 425) |
| J4 | RITISADQSTNTVYMELSSLRSDDTAVYYCAK | VGLRGINMVGGLAMNWFDP | WGQGTLVTVSSAS |
| | (SEQ ID NO: 395) | (SEQ ID NO: 164) | (SEQ ID NO: 426) |
| K | RITINSDTSKNQFSLHLNSVTPEDTAVYYCVR | DFYIGPTRDVYYGMDV | WGQGTTVTVSSAS |
| | (SEQ ID NO: 396) | (SEQ ID NO: 165) | (SEQ ID NO: 427) |
| L1 | RVTITADESTQTVYMDLSSLRSDDTAVYYCAK | AGDLSVGGVLAGGVPHLRHFDP | WGQGTLVTVSSAS |
| | (SEQ ID NO: 397) | (SEQ ID NO: 166) | (SEQ ID NO: 428) |
| L2 | RVTITADESTKTVYMDLSSLRSDDTAVYYCAK | AGDLSVGGVLAGGVPHLRHFDP | WGQGTLVTVSSAS |
| | (SEQ ID NO: 398) | (SEQ ID NO: 167) | (SEQ ID NO: 429) |
| L3 | RVTITADESTKTVYMDLSSLTSDDTAVYYCAK | AGDLSVGGVLAGGVPHLRHFDP | WGQGTLVTVSSAS |
| | (SEQ ID NO: 399) | (SEQ ID NO: 168) | (SEQ ID NO: 430) |
| L4 | RVTITADESTKTVYMDLSSLRSDDTAVYYCAK | AGDLSVGGVLAGGVPHLRHFDP | WGQGTLVTVSSAS |
| | (SEQ ID NO: 400) | (SEQ ID NO: 169) | (SEQ ID NO: 431) |
| M | RVTMTTDTSTSTAYMELTSLTSEDTAVYYCAR | ESLYMIAFGRVIWPPLDY | WGQGTLVTISSAS |
| | (SEQ ID NO: 401) | (SEQ ID NO: 170) | (SEQ ID NO: 432) |

TABLE 11A
Anti-HCV E2 Fabs (IgGκ, Light chain)

| | | |
|---|---|---|
| Fab | FRAMEWORK1 | CDR1 |

| | | |
|---|---|---|
| A | EL TQSPATLSVSPGESATLSC (SEQ ID NO: 433) | RASQSVSDN LA (SEQ ID NO: 171) |
| B1 | ELTLTQSPGTLSLSPGERATLSC (SEQ ID NO: 434) | RASQSVSNS YLA (SEQ ID NO: 172) |
| B2 | TLTQSPDSLAVSLGERATINC (SEQ ID NO: 435) | KSSQSVLYSSNNKNVLA (SEQ ID NO: 173) |
| B3 | ELVMTQSPGTLSLSPGERATLSC (SEQ ID NO: 436) | RASQRVGSS YLA (SEQ ID NO: 174) |
| C1 | ELTLTQSPGTLSLSPGKRATLSC (SEQ ID NO: 437) | RASQSVSGN YLA (SEQ ID NO: 175) |
| C1* | EL TQSPSTLSLSPGEGATLSC (SEQ ID NO: 438) | RPSQSVSRN YLA (SEQ ID NO: 176) |
| C2 | EL TQSPGTLSLSPGERAALSC (SEQ ID NO: 439) | RASQSISTN YLA (SEQ ID NO: 177) |
| C2* | EL TQSPGTLSLSPGERATLSC (SEQ ID NO: 440) | RASQSVSSS YLA (SEQ ID NO: 178) |
| C3 | EL TQSPGTLSLSPGERATLSC (SEQ ID NO: 441) | RASQSVSSS YLA (SEQ ID NO: 179) |
| C4 | EL TQSPGTLSLSPGERATLSC (SEQ ID NO: 442) | RASQSVSSS YLA (SEQ ID NO: 180) |
| C5 | EL TQSPATLYVSPGERATLSC (SEQ ID NO: 443) | RASQSVPDN HLA (SEQ ID NO: 181) |
| C6 | EL TQSPATLSVSPGESATLSC (SEQ ID NO: 444) | RASQSVSSN LA (SEQ ID NO: 182) |
| D1 | EL TQSPGTLSLSPGERATLSC (SEQ ID NO: 445) | RASQSVSSS YLA (SEQ ID NO: 183) |
| D2 | EL TQSPATLSVSPGERATLSC (SEQ ID NO: 446) | RASQTISDN LA (SEQ ID NO: 184) |
| D3 | ELTLTQSPGTLSLSPGERATLSC (SEQ ID NO: 447) | RASQTVSSS YLA (SEQ ID NO: 185) |
| D4 | ELVMTQSPGTLSLSPGERATLSC (SEQ ID NO: 448) | RASQSVSSS YLA (SEQ ID NO: 186) |
| E | ELVLTQSPLSLPVTLGQPASISC (SEQ ID NO: 449) | RSTQSLVYSDGNT YLN (SEQ ID NO: 187) |
| F | ELQMTQSPSFLSASVGDRVTITC (SEQ ID NO: 450) | RASQGISS YLA (SEQ ID NO: 188) |
| G | EL TQSPVSLPVTPGEPASISC (SEQ ID NO: 451) | RSSQSLLHSNGNH YLD (SEQ ID NO: 189) |
| H1 | ELTLTQSPGTLSLSPGERATLSC (SEQ ID NO: 452) | RASQSISSS YLA (SEQ ID NO: 190) |
| H1* | EL TQSPATLSVSPGERATLSC (SEQ ID NO: 453) | RASRGISSN LA (SEQ ID NO: 191) |
| H1** | ELTLTQSPGTLSLSPGERATLSC (SEQ ID NO: 454) | RASQSVSSDS LA (SEQ ID NO: 192) |
| H2 | ELTLTQSPGTLSLSPGERGTLSC (SEQ ID NO: 455) | RASQSVSSS YLA (SEQ ID NO: 193) |
| H3 | EL TQSPATLSVSPGERATLSC (SEQ ID NO: 456) | RASQSVSSN LA (SEQ ID NO: 194) |
| I | ELTLTQSPATLSVSPGERATLFC (SEQ ID NO: 457) | RANQSVGRN LA (SEQ ID NO: 195) |
| J1 | ELVLTQSPGTLSLSPGERATLSC (SEQ ID NO: 458) | RASQSVSSS YLA (SEQ ID NO: 196) |
| J2 | EL TQSPGTLSLSPGERATLSC (SEQ ID NO: 459) | RASQSVSSS YLA (SEQ ID NO: 197) |
| J3 | EL TQSPGTLSLSPGERATLSC (SEQ ID NO: 460) | RASQSVSSS YLA (SEQ ID NO: 198) |
| J3* | EFTLTQSPGTLSLSPGERGTLSC (SEQ ID NO: 461) | RASQSVSSS YLA (SEQ ID NO: 199) |
| J4 | ELTLTQSPGTLSLSPGERATLSC (SEQ ID NO: 462) | RASQSVSSS YLA (SEQ ID NO: 200) |
| K | EL TQSPGTLSLSPGERATLSC (SEQ ID NO: 463) | RASQSVSSNS LA (SEQ ID NO: 201) |
| L1 | EL TQSPGTLSLSPGERATLSC (SEQ ID NO: 464) | RASQSITSR YLA (SEQ ID NO: 202) |
| L2 | EL TQSPGTLSLSPGERATLSC (SEQ ID NO: 464) | RASQSITSR YLA (SEQ ID NO: 202) |
| L3 | ELVMTQSPATLSLSPGERATLSC (SEQ ID NO: 465) | RASQSVGS YLA (SEQ ID NO: 203) |
| L4 | EL TQSPGTLSLSPGERATLSC (SEQ ID NO: 466) | RAGQTVASNS LA (SEQ ID NO: 204) |
| M | ELTLTQSPGTLSLSPGERATLSC (SEQ ID NO: 467) | RASQSIRSS YLA (SEQ ID NO: 205) |

TABLE 11B
Anti-HCV E2 Fabs (IgGκ, Light chain)

| | | | |
|---|---|---|---|
| Fab | FRAMEWORK2 | CDR2 | FRAMEWORK 3 |

| | | | |
|---|---|---|---|
| A | WYQQKPGQAPRLLIY | GASSRAP (SEQ ID NO: 206) | AIPGRFSGSGSGTDFTLTISRLEPEDLAVYHC |
| | (SEQ ID NO: 468) | | (SEQ ID NO: 503) |
| B1 | WYQQKPGQAPRLLIY | GASSRAT (SEQ ID NO: 207) | GIPDRFSGSGSGTDFTLTISRLEPEDFAVYYC |
| | (SEQ ID NO: 469) | | (SEQ ID NO: 504) |
| B2 | WYQQKPGQPPQLLIY | WASTRES (SEQ ID NO: 208) | GVPDRFSGSGSGTDFTLTISSLQAEDVAVYFC |
| | (SEQ ID NO: 470) | | (SEQ ID NO: 505) |
| B3 | WYQQKPGQAPRLLVY | GASSRAT (SEQ ID NO: 209) | GIPDRFSGSGSGTDFTLTISRLQPEDFAVYYC |
| | SEQ ID NO: 471) | | (SEQ ID NO: 506) |
| C1 | WYQQKPGQAPRLLIY | GASNRAT (SEQ ID NO: 210) | GIPHRFSGSGSGTDFTLTISRLEPEDFAVYYC |
| | (SEQ ID NO: 472) | | (SEQ ID NO: 507) |
| C1* | WYQQKPGQAPRLLIY | GASTRAT (SEQ ID NO: 211) | GIPDRFSGSGSGTNFTLTISRLEPEDFAVYFC |
| | (SEQ ID NO: 473) | | (SEQ ID NO: 508) |
| C2 | WYQQKPGQAPRLLIY | GTSNRAT (SEQ ID NO: 212) | GIPDRFSGTGSGTDFSLTISRLEPEDSAVYYC |
| | (SEQ ID NO: 474) | | (SEQ ID NO: 509) |
| C2* | WYQQKPGQAPRLLIY | GASSRAT (SEQ ID NO: 213) | GIPDRFSGSGSGTDFTLTISRLEPEDFAVYYC |
| | (SEQ ID NO: 475) | | (SEQ ID NO: 510) |
| C3 | WYQQKPGQAPRLLIY | GASSRAT (SEQ ID NO: 214) | GIPDRFSGSGSGTDFTLTISGLEPEDFAVYYC |
| | (SEQ ID NO: 476) | | (SEQ ID NO: 511) |
| C4 | WYQQKPGQAPRLLIY | GASSRAT (SEQ ID NO: 215) | GIPDRFSGSGSGTDFTLTISRLEPEDFAVYYC |
| | (SEQ ID NO: 477) | | (SEQ ID NO: 512) |
| C5 | WYQQKPGQTPRLLIY | GASKRAT (SEQ ID NO: 216) | GIPDRFSGSGSGTDFTLTISRLEPEDFAVYYC |
| | (SEQ ID NO: 478) | | (SEQ ID NO: 513) |
| C6 | WYQQKPGQAPRLLIY | GASTRAT (SEQ ID NO: 217) | GIPARFSGSGSGTDFTLTISRLEPEDFAVYYC |
| | (SEQ ID NO: 479) | | (SEQ ID NO: 514) |
| D1 | WYQQKPGQAPRLLIY | GASSRAT (SEQ ID NO: 218) | GIPDRFSGSGSGTDFTLTISRLEPEDFAVYYC |
| | (SEQ ID NO: 480) | | (SEQ ID NO: 515) |
| D2 | WYQQKPGQAPRLLIY | GASSRAT (SEQ ID NO: 219) | GIPDRFSGSGSGTDFTLTISRLEPEDFAVYYC |
| | (SEQ ID NO: 481) | | (SEQ ID NO: 516) |
| D3 | WYQQKPGQAPRLLIY | GASSRAT (SEQ ID NO: 220) | GIPDRFSGSGSGTDFTLTISRLEPEDFAVYYC |
| | (SEQ ID NO: 482) | | (SEQ ID NO: 517) |
| D4 | WYQQKPGQAPRLLIY | GASSRAT (SEQ ID NO: 221) | GIPDRFSGSGSGTDFTLTITRLEPEDFAVYYC |
| | (SEQ ID NO: 483) | | (SEQ ID NO: 518) |
| E | WFHQRAGQPPRRLIY | KVSNRDS (SEQ ID NO: 222) | GVPERFSGSGSGTDFTLKISRVEAEDVGIYYC |
| | (SEQ ID NO: 484) | | (SEQ ID NO: 519) |
| F | WYQQKPGKAPKLLIS | SVSTLQS (SEQ ID NO: 223) | GVSSRFSGSGSGTGFTLTISSLQSEDSATYYC |
| | (SEQ ID NO: 485) | | (SEQ ID NO: 520) |
| G | WYLQKPGQSPQLLMY | LGSNRAS (SEQ ID NO: 224) | GVPDRFSGSGSGTDFTLKISRVEAEDVGVYYC |
| | (SEQ ID NO: 486) | | (SEQ ID NO: 521) |
| H1 | WYQQKPGQAPRLLIY | GASRRAT (SEQ ID NO: 225) | GIPDRFSGSGSGTDFTLTISRLEPEDFAVYYC |
| | (SEQ ID NO: 487) | | (SEQ ID NO: 522) |
| H1* | WYQQKPGQAPRLLIY | GASSRAT (SEQ ID NO: 226) | GIPDRFSGSGSGTDFTLTISRLEPEDFAVYYC |
| | (SEQ ID NO: 488) | | (SEQ ID NO: 523) |
| H1** | WYQQKPGQAPRLLIY | GASSRAT (SEQ ID NO: 227) | GIPDRFSGSGSGTDFTLTISRLEPEDLGVYYC |
| | (SEQ ID NO: 489) | | (SEQ ID NO: 524) |
| H2 | WYQQKPGQAPRLLIY | GASSRAT (SEQ ID NO: 228) | GIPDRFSGSGSGTDFTLTISRLEPEDFAVYYC |
| | (SEQ ID NO: 490) | | (SEQ ID NO: 525) |
| H3 | WYQQKPGQAPRLLIY | GASTRAT (SEQ ID NO: 229) | GIPARFSGSGSGTDFTLTVSRLEPEDSAVYFC |
| | (SEQ ID NO: 491) | | (SEQ ID NO: 526) |
| I | WYQQKPGQAPRLLIY | GISTRTT (SEQ ID NO: 230) | TTPTRFSGSGSGTDFTLTISRLQSEDFAVYYC |
| | (SEQ ID NO: 492) | | (SEQ ID NO: 527) |
| J1 | WYQQKPGQAPRLLIY | GASSRAT (SEQ ID NO: 231) | GIPDRFSGSGSGTDFALTITRLEPEDFAVYYC |
| | (SEQ ID NO: 493) | | (SEQ ID NO: 528) |
| J2 | WYQQKPGQAPRLLIY | GASSRAT (SEQ ID NO: 232) | GIPDRFSGSGSGTDFTLTISRLEPEDFAVYYC |
| | (SEQ ID NO: 494) | | (SEQ ID NO: 529) |
| J3 | WYQQKPGQAPRLLIY | GASSRAT (SEQ ID NO: 233) | GIPDRFSGSGSGTDFTLTISGLEPEDFAVYYC |
| | (SEQ ID NO: 495) | | (SEQ ID NO: 530) |
| J3* | WYQQKPGQAPRLLIY | GASSRAT (SEQ ID NO: 234) | GIPDRFSGSGSGTDFTLTISRLEPEDFAVYYC |
| | (SEQ ID NO: 496) | | (SEQ ID NO: 531) |
| J4 | WYQQKPGQAPRLLIY | GASSRAT (SEQ ID NO: 235) | GIPDRFSGSGSGTDFTLTISRLEPEDFAVYYC |
| | (SEQ ID NO: 497) | | (SEQ ID NO: 532) |
| K | WYQQKPGLAPRLLIY | GASSRAT (SEQ ID NO: 236) | GIPDRFSGSGSGTGFTLTISTLEPEDFAIYYC |
| | (SEQ ID NO: 498) | | (SEQ ID NO: 533) |
| L1 | WYQQKPGQAPRLLIY | GASSRAT (SEQ ID NO: 237) | GIPDRFSGSGSGTDFTLTISRLEPEDFAVYYC |
| | (SEQ ID NO: 499) | | (SEQ ID NO: 534) |
| L2 | WYQQKPGQAPRLLIY | GASSRAT (SEQ ID NO: 237) | GIPDRFSGSGSGTDFTLTISRLEPEDFAVYYC |
| | (SEQ ID NO: 499) | | (SEQ ID NO: 534) |
| L3 | WYQQKPGQAPRLLIY | DASNRAT (SEQ ID NO: 238) | GIPARFSGSGSGTDFTLTISSLEPEDFAVYFC |
| | (SEQ ID NO: 500) | | (SEQ ID NO: 535) |
| L4 | WYQHKPGQAPRLLIY | GASIRAS (SEQ ID NO: 239) | GIPDRFSGSGSGTDFTLTISRLEPEDFAVYYC |
| | (SEQ ID NO: 501) | | (SEQ ID NO: 536) |
| M | WYQQKPGQAPRLLIY | AAASRAT (SEQ ID NO: 240) | GIPDRFSGSGSGTDFTLTISRLEPEDFAVYFC |
| | (SEQ ID NO: 502) | | (SEQ ID NO: 537) |

TABLE E11C
Anti-HCV E2 Fabs (IgGκ, Light chain)

| | | |
|---|---|---|
| Fab | CDR3 | FRAMEWORK4 |

| | | |
|---|---|---|
| A | QQYGAS PWT (SEQ ID NO: 241) | FGQGTKVEIKRTVAAPSVFIFPPSDEQLKSGTASVV (SEQ ID NO: |
| | | 538) |
| B1 | QQYGSS PQT (SEQ ID NO: 242) | FGQGTKVEIKRTVAAPSVFIFPPSDEQLKSGTASVV (SEQ ID NO: |
| | | 539) |
| B2 | QQYYST PFT (SEQ ID NO: 243) | FGPGTKVEIKRTVAAPSVFIFPPSDEQLKSGTASVV (SEQ ID NO: |
| | | 540) |
| B3 | QQYGTT (SEQ ID NO: 244) | FGQGTRVDIKRTVAAPSVSIFPPSDEQLKSGTASVV (SEQ ID NO: |
| | | 541) |
| C1 | QQYGSS PT (SEQ ID NO: 245) | FGQGTRVDIKRTVAAPSVFIFPPSDEQLKSGTASV (SEQ ID NO: 542) |
| C1* | QHYGNS PPYT (SEQ ID NO: 246) | FGQGTKLEIKRTVAAPSVFIFPP (SEQ ID NO: 543) |
| C2 | QQYGTS PFT (SEQ ID NO: 247) | FGPGTKVDIKRTVAAPSVFIFPPS (SEQ ID NO: 544) |
| C2* | QQYGSS PQT (SEQ ID NO: 248) | FGQGTKVEIKRTVAAPSVFIFPPSDEQLKSGTASVV (SEQ ID NO: |
| | | 545) |
| C3 | QQYGSS PLT (SEQ ID NO: 249) | FGGGTKVEIKRTVAAPSVFIFPPSD (SEQ ID NO: 546) |
| C4 | QHYGSS SYT (SEQ ID NO: 250) | FGQGTRVEIKRTVAAPSVFIFPPSDEQLKSGTASVV (SEQ ID NO: |
| | | 547) |
| C5 | QQYGSS PQT (SEQ ID NO: 251) | FGQGTKVEIKRTVAAPSVFIFPPSDEQLKSGTASVV (SEQ ID NO: |
| | | 548) |
| C6 | QQYGGSPPYT (SEQ ID NO: 252) | FGQGTKLEIKRTVAAPSVFIFPPSDEQLKSGTASVV (SEQ ID NO: |
| | | 549) |
| D1 | QQYGSS PQT (SEQ ID NO: 253) | FGQGTKVEIKRTVAAPSVFIFPPSDEQLKSGTASVV (SEQ ID NO: |
| | | 550) |
| D2 | QQYGSS PQT (SEQ ID NO: 254) | FGQGTKVEIKRTVAAPSVFIFPPSDEQLKSGTASVV (SEQ ID NO: |
| | | 551) |
| D3 | QQYGSS PQT (SEQ ID NO: 255) | FGQGTKVEIKRTVAAPSVFIFPPSDEQLKSGTASVV (SEQ ID NO: |
| | | 552) |
| D4 | QQYGSS PQT (SEQ ID NO: 256) | FGQGTKVQIKRTVAAPSVFIFPPSDEQLKSGTASVV (SEQ ID NO: |
| | | 553) |
| E | MQGAHW PPT (SEQ ID NO: 257) | FGGGTKVEINRTVAAPSVFIFPPSDEQLKSGTA (SEQ ID NO: 554) |
| F | EQLNSF PYT (SEQ ID NO: 258) | FGQGTKLEIKRTVAAPSVFIFPPSD (SEQ ID NO: 555) |
| G | MQGLQT PWT (SEQ ID NO: 259) | FGQGTKVEIKRTVAAPSVFIFPPSD (SEQ ID NO: 556) |
| H1 | QQYGSS PLT (SEQ ID NO: 260) | FGGGTKVEIKRTVAAPSVFIFPPSD (SEQ ID NO: 557) |
| H1* | QQYGSS PQT (SEQ ID NO: 261) | FGQGTEVEIKRTVAAPSVFIFPPSDEQ (SEQ ID NO: 558) |
| H1** | QQYGPS PPGYT (SEQ ID NO: 262) | FGQGTKLEIKRTVAAPSVFIFPPSDEQLKSGTASVV (SEQ ID NO: |
| | | 559) |
| H2 | QQYGSS PQT (SEQ ID NO: 263) | FGQGTKVEIKRTVAAPSVFIFPPSDEQLKSGTASVV (SEQ ID NO: |
| | | 560) |
| H3 | QQYYRS PLT (SEQ ID NO: 264) | FGGGTKVEIKRTVAAPSVFIFPPSDEQLKSGTASVV (SEQ ID NO: |
| | | 561) |
| I | QQYNKWPPWT (SEQ ID NO: 265) | FGQGTKLEIKRTVAAPSVFVFPPS (SEQ ID NO: 562) |
| J1 | QQYGSS PQT (SEQ ID NO: 266) | FGQGTKVEIKRTVAAPSVFIFPPSDEQLKSGTASVV (SEQ ID NO.: |
| | | 563) |
| J2 | QQYGSS PQT (SEQ ID NO: 267) | FGQGTKVEIKRTVAAPSVFIFPPSDEQLKSGTASVV (SEQ ID NO: |
| | | 564) |
| J3 | QQYGSS PQT (SEQ ID NO: 268) | FGQGTKVEIKRTVAAPSVFIFPPSDEQLKSGTASVV (SEQ ID NO: |
| | | 565) |
| J3* | QQYGSS PQT (SEQ ID NO: 269) | FGQGTKVEIKRTVAAPSVFIFPPSDEQLKSGTASVV (SEQ ID NO: |
| | | 566) |
| J4 | QQYGSS PQT (SEQ ID NO: 270) | FGQGTEVEIKRTVAAPSVFIFPPSDEQLKSGTASVV (SEQ ID NO: |
| | | 567) |
| K | QQYGGS PPRFT (SEQ ID NO: 271) | FGPGTKVDIRRTVAAPSVFIFPPSDEQLKSGTASVV (SEQ ID NO: |
| | | 568) |
| L1 | QQYGDS VG (SEQ ID NO: 272) | FGPGTKVEIKRTVAAPSVFIFPPSDEQLKSGTASVV (SEQ ID NO: |
| | | 569) |
| L2 | QQYGDS VG (SEQ ID NO: 272) | FGPGTKVEIKRTVAAPSVFIFPPSDEQLKSGTASVV (SEQ ID NO: |
| | | 569) |
| L3 | QQYGSS PLT (SEQ ID NO: 273) | FGQGTKVEIKRTVAAPSVFIFPPSDEQLKSGTASVV (SEQ ID NO: |
| | | 570) |
| L4 | QQYGLS ST (SEQ ID NO: 274) | FGQGTRLEIKRTVAAPSVFIFPPSDEQLKSGTASVV (SEQ ID NO: |
| | | 571) |
| M | HHYGGS PRT (SEQ ID NO: 275) | FGQGTKVEIKRTVAAPSVFIFPPSDEQLKSGTASVV (SEQ ID NO: |
| | | 572) |

[0436] The binding properties of soluble Fabs prepared from the phage-Fab clones were characterized (FIG. 1). This allowed the Fabs to be sorted into three groups recognizing three antigenic regions (AR) of HCV E2 as shown in the table below.

TABLE 12
Three Distinct Antigenic Regions Defined by the Fab Panel

| | | | Competition | Competition |
|---|---|---|---|---|
| | | Epitope | with MAb | with MAb |
| AR | AR Recognized by Fab | Presentation | AR3A | H53 |
| 1 | B1, B2, B3, D1, D2, | E2 > E1E2 | No/Partial | Strong |
| | D3, D4, E (63%) | | | |
| 2 | F, G (2%) | E2 > E1E2 | No | Partial |
| 3 | A, C1, C2, C3, C4, | E1E2 > E2 | E1E2 > E2 | Partial |
| | C5, C6, H1, H2, H3, | | | |
| | I, J1, J2, J3, J4, L1, L2, | | | |
| | L3, L4, M (35%) | | | |

[0437] The numbers in parenthesis denote the percentage of clones recognizing each AR in the phage-display panning. It is important to note that highly isolate-specific antibodies, e.g. those against HVR1, would unlikely be selected in this study due to the use of heterologous antigens in the panning. Fab K was excluded in this table due to its poor signal in FIG. 1.

[0438] A total of seven Fabs from different heavy-chain groups recognizing the three different antigenic regions were converted into full-length IgG1s and their binding properties were evaluated (Table 13). In addition, the neutralizing activities of the mAbs were studied using a panel of HCV pseudotype virus particles (HCVpp) displaying E1E2 from diverse genotypes (Table 14). See Wakita et al. Nat. Med. 11: 791-96 (2005); Bartosch et al., J. Exp. Med. 197: 633-42 (2003); Hsu et al., Proc. Natl. Acad. Sci. USA 100: 7271-7276 (2003)).

TABLE 13
Binding properties of E2-specific IgGs

| | | | | | Apparent affinity for E1- | |
|---|---|---|---|---|---|---|
| | | | | | E2 (nM)^{d} | |
| | Derived from | | | IC50 E1-E2 binding to | (GT1a) | (GT1a) |
| IgG1 | Fab | Specificity | Epitope | CD81-LEL^{a} | HCV-1^{b} | H77^{c} |
| AR1A | B2 | AR1 | Discontinuous | 5.7 | 2.6 | 3.8 |
| AR1B | D1 | AR1 | Discontinuous | — | 0.4 | 0.6 |
| AR2A | G | AR2 | Discontinuous | — | 3.1 | 1.6 |
| AR3A | C1 | AR3 | Discontinuous | 0.5 | 1.3 | 3.7 |
| AR3B | J2 | AR3 | Discontinuous | 1.6 | 2.0 | 6.0 |
| AR3C | H3 | AR3 | Discontinuous | 2.0 | 1.4 | 2.3 |
| AR3D | L4 | AR3 | Discontinuous | 1.0 | 2.4 | 4.0 |

^{a}Antibody concentration (nM) to inhibit 50% of E1-E2 (isolate H77) binding to immobilized recombinant large extracellular loop of CD81 (CD81-LEL).
^{b}Vaccinia-expressed E1-E2.
^{c}E1-E2 produced by transfected 293T cells.
^{d}Apparent affinity is defined as the antibody concentration required to achieve half-maximal binding in an ELISA. Data shown are the means of at least two independent experiments. All mAbs bind natively folded, but not reduced and denatured, E2. GT1a indicates genotype 1a, GT2a indicates genotype 2a and dashes indicate that no significant inhibition or binding was observed with the highest mAb concentration tested.

TABLE 14
Neutralizing activity (IC50) of E2-specific IgGs

| | HCVpp^{b} | | | | | | | | | |
|---|---|---|---|---|---|---|---|---|---|---|
| | 1a | | 1b | | 2a | | 2b | 4 | 5 | Control |
| IgG^{a} | H77 | H | OH8 | UKN1B12.16 | J6 | UKN2A1.2 | UKN2B1.1 | UKN4.21.16 | UKN5.15.7 | VSV |
| AR1A | — | | — | — | — | — | — | — | — | — |
| AR1B | — | | — | — | — | — | — | — | — | — |
| AR2A | 1 | 5 | — | — | — | 5 | 10 | 1 | 10 | — |
| AR3A | 1 | 1 | 5 | 1 | 10 | 10 | 10 | 1 | 1 | — |
| AR3B | 1 | 1 | 5 | 1 | 10 | 5 | 10 | 1 | 1 | — |
| AR3C | 1 | 1 | 5 | 1 | 10 | 10 | 10 | 1 | 1 | — |
| AR3D | 1 | 1 | 5 | 1 | 50 | 25 | 25 | 1 | 10 | — |

^{a}mAbs at 50, 25, 10, 5 or 1 μg/mL were tested for virus neutralization, and the lowest antibody concentrations that reduced >50% of virus infectivity are shown. Dashes indicate no or <50% virus neutralization with 50 μg/mL mAb. Data shown are the means of at least two experiments.
^{b}Neutralization of HCVpp was determined by the reduction in luciferase activity in Huh-7 cells infected with HCVpp displaying Env from different HCV isolates. The panel of HCVpps shown includes HCV Env proteins that produce a signal at least tenfold higher than the background signal induced by the control pseudotype virus generated without HCV Env cDNA. Many HCV Env proteins, including CH35 (genotype 1b), UKN3A1.28c (genotype 3a), UKN6.5.8 (genotype 6) and 13 different KP Env clones (genotype 1a, see FIG. 7B), did not produce a consistent signal tenfold higher than background and were excluded from this analysis.

[0439] The above results indicate that all recombinant mAbs bound the E1-E2 complex from HCV genotype 1a with approximately similar apparent affinities, in the range of 0.4-6 nM, but only antigenic region 3 (AR3)-specific mAbs reacted with genotype 2a HCV, suggesting that epitopes in AR3 are highly conserved. Monoclonal antibodies ARIA and AR3A-D inhibited the binding of E1-E2 to the virus co-receptor CD81 (Pileri et al. Science 282, 938-41 (1998); Cocquerel et al., J. Virol. 77, 10677-83 (2003)) at nanomolar concentrations, suggesting that these antibodies could potentially block HCV interaction with CD81 and thereby inhibit infection.

[0440] In addition, these experiments indicate the following.

[0441] First, antibodies that bind E2 in an ELISA did not necessarily neutralize the corresponding virus. The AR1-specific antibodies bound recombinant E1-E2 from genotype 1a HCV isolate H77 with a similar or higher affinity than AR3-specific antibodies, but they did not neutralize the virus, suggesting that the AR1 epitopes are available on isolated envelope proteins but not on infectious virions. Of note, the Fab fragments of antibodies ARIA and AR1B (that is, B2 and D1, Table 13) did neutralize HCVpp-H77 (FIG. 2B), indicating that steric hindrance, possibly by E1, prevents virus neutralization by whole AR1-specific antibodies.

[0442] Second, the ability of the antibodies to inhibit E1-E2 binding to CD81 in the neutralization of binding (NOB) assay (Rosa et al., Proc. Natl. Acad. Sci. USA 93: 1759-63 (1996)) did not fully predict virus neutralization.

[0443] Third, and most notably, the AR3-specific antibodies bound E1-E2 from both genotypes 1a and 2a at nanomolar affinities and cross-neutralized many HCVpps tested. These results show that AR3 is a relatively conserved neutralizing site on HCV E2.

[0444] The specificity, affinity and neutralizing activities of the E2-specific human monoclonal antibodies were evaluated by mapping the antigenic regions using competition ELISA and alanine-mutagenesis scanning. Results are shown in the following Tables 15 and 16.

TABLE 15
Antibody Competition

| | | Blocking MAb | | | | | | | | | | |
|---|---|---|---|---|---|---|---|---|---|---|---|---|
| | origin | h | h | h | h | h | h | h | h | h | h | h |
| | specificity | AR1 | AR1 | AR2 | AR3 | AR3 | AR3 | AR3 | Dom A | Dom B | Dom B | Dom C |
| | MAb | AR1A | AR1B | AR2A | AR3A | AR3B | AR3C | AR3D | CBH-4B | CBH-2 | CBH-5 | CBH-7 |
| Binding MAb | AR1A | 15 | 15 | 100 | 44 | 53 | 37 | 54 | 102 | 83 | 54 | 16 |
| (biotinylated) | AR1B | 15 | 6 | 89 | 76 | 80 | 66 | 84 | 106 | 98 | 89 | 20 |
| | AR2A | 76 | 57 | 15 | 76 | 92 | 86 | 75 | 87 | 93 | 91 | 17 |
| | AR3A | 30 | 96 | 72 | 10 | 12 | 10 | 12 | 93 | 48 | 17 | 33 |
| | AR3B | 35 | 104 | 87 | 18 | 21 | 19 | 20 | 93 | 46 | 21 | 35 |
| | AR3C | 34 | 91 | 83 | 9 | 12 | 8 | 12 | 99 | 65 | 19 | 39 |
| | AR3D | 43 | 92 | 75 | 13 | 15 | 13 | 14 | 97 | 51 | 18 | 33 |

| | | Blocking MAb | | | | | | |
|---|---|---|---|---|---|---|---|---|
| | origin | m | r | r | m | r | r | r |
| | specificity | dis-cont. | 384-391 | 396-407 | 412-424 | 412-423 | 432-443 | 436-443 |
| | MAb | H53 | 7/59 | 9/27 | AP33* | 3/11* | 1/39 | 2/69A |
| Binding MAb | AR1A | 20 | 70 | 74 | 102 | 66 | 84 | 86 |
| (biotinylated) | AR1B | 12 | 77 | 70 | 69 | 61 | 89 | 85 |
| | AR2A | 107 | 99 | 67 | 63 | 94 | 90 | 82 |
| | AR3A | 75 | 84 | 48 | 26 | 36 | 76 | 55 |
| | AR3B | 73 | 86 | 49 | 32 | 41 | 79 | 58 |
| | AR3C | 77 | 95 | 62 | 33 | 44 | 83 | 68 |
| | AR3D | 74 | 86 | 49 | 27 | 37 | 80 | 56 |

| | | Blocking MAb | | | | | | |
|---|---|---|---|---|---|---|---|---|
| | origin | r | r | m | r | r | m | m |
| | specificity | 436-446 | 436-447 | 464-471 | 524-531 | 544-551 | 640-654 | 197-207 |
| | MAb | 7/16B | 11/20 | AP320 | 9/75 | 6/53 | ALP98 | A4 |
| Binding MAb | AR1A | 86 | 84 | 84 | 24 | 89 | 92 | 97 |
| (biotinylated) | AR1B | 91 | 79 | 83 | 38 | 92 | 92 | 103 |
| | AR2A | 95 | 84 | 70 | 82 | 92 | 94 | 92 |
| | AR3A | 101 | 47 | 77 | 39 | 104 | 96 | 94 |
| | AR3B | 92 | 49 | 79 | 44 | 108 | 102 | 91 |
| | AR3C | 99 | 62 | 81 | 51 | 105 | 99 | 93 |
| | AR3D | 94 | 47 | 77 | 53 | 103 | 97 | 90 |

Numbers indicate percentage of residual binding signals of biotinylated human mAbs in the presence of blocking mAbs. Origin: h, human; m, mouse; r, rat.

TABLE 16
Alanine-scanning Mutagenesis

| | | Q412A | L413A | I414A | N415A | T416A | N417A | G418A | S419A | W420A | H421A | I422A | N423A | S424A |
|---|---|---|---|---|---|---|---|---|---|---|---|---|---|---|
| Human IgG | AR1A | 145 | 103 | 128 | 106 | 23 | 17 | 51 | 84 | 141 | 167 | 106 | 79 | 103 |
| | AR1B | 48 | 109 | 147 | 131 | 99 | 54 | 143 | 118 | 41 | 72 | 58 | 38 | 103 |
| | AR2A | 95 | 92 | 180 | 122 | 99 | 58 | 83 | 93 | 80 | 84 | 95 | 69 | 91 |
| | AR3A | 53 | 88 | 132 | 103 | 82 | 64 | 86 | 92 | 78 | 88 | 113 | 60 | 5 |
| | AR3B | 37 | 90 | 116 | 89 | 41 | 65 | 47 | 83 | 65 | 53 | 78 | 35 | 7 |
| | AR3C | 85 | 111 | 207 | 138 | 152 | 73 | 188 | 102 | 78 | 91 | 111 | 84 | 7 |
| | AR3D | 44 | 83 | 126 | 131 | 90 | 74 | 60 | 73 | 68 | 87 | 113 | 65 | 6 |

| | | R483A | P484A | Y485A | W487A | H488A | Y489A | P491A | G523A | P525A | T526A | Y527A | W529A |
|---|---|---|---|---|---|---|---|---|---|---|---|---|---|
| Human IgG | AR1A | 64 | 38 | 17 | 89 | 91 | 189 | 119 | 112 | 101 | 81 | 61 | 367 |
| | AR1B | 32 | 45 | 30 | 70 | 63 | 52 | 118 | 33 | 33 | 48 | 83 | 94 |
| | AR2A | 68 | 77 | 67 | 93 | 72 | 138 | 123 | 129 | 109 | 101 | 149 | 132 |
| | AR3A | 114 | 62 | 124 | 109 | 90 | 111 | 161 | 19 | 0 | 111 | 163 | 194 |
| | AR3B | 97 | 58 | 125 | 113 | 90 | 53 | 178 | 49 | 26 | 82 | 119 | 80 |
| | AR3C | 96 | 75 | 112 | 64 | 48 | 98 | 173 | 38 | 16 | 123 | 54 | 51 |
| | AR3D | 151 | 90 | 145 | 119 | 123 | 113 | 204 | 48 | 53 | 135 | 119 | 88 |

| | | G530A | N532A | D533A | T534A | D535A | V538A | N540A | R543A | P544A | P545A | G547A | W549A | F550A |
|---|---|---|---|---|---|---|---|---|---|---|---|---|---|---|
| Human IgG | AR1A | 227 | 82 | 101 | 100 | 235 | 17 | 0 | 239 | 69 | 74 | 34 | 0 | 379 |
| | AR1B | 50 | 73 | 90 | 49 | 121 | 52 | 25 | 135 | 16 | 20 | 0 | 0 | 257 |
| | AR2A | 53 | 58 | 60 | 84 | 133 | 62 | 30 | 125 | 126 | 106 | 83 | 151 | 156 |
| | AR3A | 9 | 121 | 89 | 126 | 0 | 47 | 22 | 195 | 241 | 212 | 115 | 207 | 218 |
| | AR3B | 14 | 132 | 101 | 113 | 20 | 67 | 29 | 265 | 303 | 321 | 177 | 228 | 259 |
| | AR3C | 0 | 129 | 66 | 119 | 0 | 34 | 0 | 111 | 158 | 159 | 64 | 155 | 134 |
| | AR3D | 24 | 159 | 146 | 181 | 32 | 95 | 56 | 276 | 318 | 307 | 202 | 274 | 320 |

The panel of variants (top row) includes substitutions at conserved residues in the putative CD81-binding regions of E2. Substitutions important for CD81 binding are shaded and include L413A, W420A, H421A, I422A, N423A, S424A, G523A, T526A, Y527A, W529A, G530A, D535A, V538A, N540A and F550A. (Owsianka, A. M. et al., J. Virol. 80, 8695-8704 (2006)).

[0445] The antibody competition study shows that mAbs AP33 and 3/11 (*) recognize epitopes partially dependent on proper protein folding (Tarr, A. W. et al. Hepatology 43, 592-601 (2006)). The results confirm the broad designation of the antigenic regions and suggest that the discontinuous epitopes in AR3 are formed by at least three segments between amino acids 396-424, 436-447 and 523-540; the first and third segments also contribute to the CD81-binding domain of E2 (Owsianka, A. M. et al. J. Virol. 80, 8695-8704 (2006)), and the conserved residues Ser424, Gly523, Pro525, Gly530, Asp535, Val538 and Asn540 (Owsianka, A. M. et al. J. Virol. 80, 8695-8704 (2006)) are probably involved in the binding of the AR3-specific antibodies (FIG. 3).

[0446] A key question is whether broadly neutralizing AR3-specific antibodies can protect against infection by heterologous HCV quasispecies. As a first step to evaluate the mAbs and establish the essential parameters for passive antibody protection, the human liver-chimeric Alb-uPA/SCID mouse model was used (Kneteman, N. M. et al. Hepatology 43, 1346-1353 (2006); Lindenbach, B. D. et al. Proc. Natl. Acad. Sci. USA 103, 3805-3809 (2006)). Although this animal model is not suitable for studying virus pathogenesis, owing to its lack of a functional adaptive immune system, the question of whether antibodies can protect against HCV challenge is appropriate.

[0447] The kinetics and tolerability were first established in the animal model for the antibodies AR3A, AR3B and a human isotype control IgG1 to HIV-1, b6. Previous passive antibody studies in animal models have reported that relatively high antibody concentrations are needed for protection. For instance, to achieve sterilizing immunity by single mAB treatment against HIV in hu-PBL/SCID mice (Gauduin et al. Nat. Med. 3, 1389-1393 (1997) (and against chimeric simian/human immunodeficiency virus (SHIV) in macaques (Parren et al. J. Virol. 75, 8340-8347 (2001)), serum concentrations in the animals of the order of 100-fold in vitro 90% neutralization titers (IC₉₀) have been required. To study the kinetics of the human MAbs AR3A, AR3B and b6 in control Alb-uPA/SCID mice, transplanted Alb-uPA/SCID mice with a low level of human liver chimerism were injected intraperitoneally with 100, 150 or 200 mg/kg MAb, and blood samples were collected by tail bleed, Human antibody in the murine sera was measured by a quantitative sandwich ELISA using conjugated and unconjugated goat anti-human F(ab)′₂ antibody. The IC₉₀ titers (against HCVpp-H77) for MAb AR3A and AR3B are 11 and 20 g/mL, respectively, suggesting that relatively large doses of antibody may be required for protection. A dose of 200 mg/kg given through intraperitoneal injection was required to achieve mean serum titers approximately 100× higher than in vitro neutralization titers. No specific weight loss or signs of illness associated with the administration of the MAbs were noted in the mice during the experiment. One mouse was euthanized due to unrelated morbidity at Day 7.

[0448] The neutralizing activity in mouse sera collected ten days after injection was determined by HCVpp-H77 neutralization assay. Mouse sera containing anti-HCV MAbs AR3A and AR3B neutralized 50% of HCVpp infectivity (IC₅₀) in the range of 1:200 to 1:1000. Control mouse sera from mice injected with an isotype MAb DEN3 or PBS (neutralized non-specifically ˜50% virus infectivity at 10-fold dilution. Non-specific neutralization was not observed when the control sera were diluted 100-fold. The conservation of virus neutralizing activity of anti-HCV MAbs also was measured and normalized to the level of human IgG in the mouse sera. In this experiment, MAbs AR3A and AR3B were titrated alongside with the mouse sera to construct the standard curves and the IC₅₀ titers of MAbs AR3A and AR3B were 0.4 and 1 μg/mL, respectively. The IC₅₀ titers of mouse sera containing anti-HCV MAbs AR3A and AR3B were in the range of 0.4-1.1 (mean 0.8±s.d. 0.3) and 0.5-3 (mean 1.2±s.d. 0.9) μg/mL, respectively. Isotype control MAbs b6 & DEN3 did not neutralize HCVpp.

[0449] The observed half-lives of mAbs AR3A, AR3B and b6 were found to be 6.0±2.2 d, 9.0±1.3 d and 7.3±1.8 d (mean±s.d.), respectively, and their specific neutralizing activities (that is, neutralizing activity relative to serum mAb concentration) were stable for at least 10 days in the mice.

[0450] The mAbs were administered intraperitoneally in passive transfer experiments to mice with high levels of human liver chimerism (see Example 1), and the mean serum titers of mAbs AR3A, AR3B and the control mAb b6, at 24 hours after injection were ˜2.5±0.3 mg/mL, 3.1±0.5 mg/mL and 2.6±0.3 mg/mL, respectively (FIG. 4). To simulate a natural human exposure to virus, we inoculated genotype 1a HCV-infected human serum intravenously into the mice. The partial amino acid sequences (residues 384-622) of forty HCVs found in the viral quasispecies population in the HCV genotype 1a-infected human serum are shown below.

TABLE 17
Cloned Variant Sequences of E2 Amino Acid Residues 384-622

| | |
|---|---|
| Name | Sequence |

| | |
|---|---|
| KP S9 | ETHVTGGATAHGASVLASLLTTGAKQNIQLINTNGSWHINRTALNCNDSLHT |
| | GFIAGLFYYNKFNSSGCPERLASCRRLDDFAQGWGPISHVNVSGPGERPYCW |
| | HYPPRPCGIVPARDVCGPVYCFTPSPVVVGTTDRAGAPTYNWGANETDVFVL |
| | NNTRPPLGNWFGCTWMNSTGFTKVCGAPPCVIGGVGNNTLRCPTDCFRKHPD |
| | ATYSRCGSGPWITPRCLVDYPYRLWHYPCTI (SEQ ID NO: 701) |
| KP R14 | ETHVTGGATAHGASVLASLLTTGAKQNIQLINTNGSWHINRTALNCNDSLHT |
| | GFIAGLFYYNKFNSSGCPERLAGCRRLDDFAQGWGPISHVNVSGPGERPYCW |
| | HYPPRPCGIVPARDVCGPVYCFTPSPVVVGTTDRAGAPTYNWGANETDVFVL |
| | NNTRPPLGNWFGCTWMNSTGFTKVCGAPPCVIGGVGNNTLRCPTDCFRKHPD |
| | ATYSRCGSGPWITPRCLVDYPYRLWHYPCTI (SEQ ID NO: 702) |
| KP S6 | ETHVTGGATAHGASVLASLLTTGAKQNIQLINTNGSWHINRTALNCNDSLHT |
| | GFIAGLFYYNKFNSSGCPERLASCRRLDDFAQGWGPISHVNVSGPGERPYCW |
| | HYPPRPCGIVPARDVCGPVYCFTPSPVVVGTTDRAGAPSYNWGANETDVFVL |
| | NNTRPPLGNWFGCTWMNSTGFTKVCGAPPCVIGGVGNNTLRCPTDCFRKHPD |
| | ATYSRCGSGPWITPRCLVDYPYRLWHYPCTI (SEQ ID NO: 703) |
| KP S18 | ETHVTGGATAHGASVLASLLTTGAKQNIQLINTNGSWHINRTALNCNDSLHT |
| | GFIAGLFYYNKFNSSGCPERLASCRRLDDFAQGWGPISHVNVSGPGERPYCW |
| | HYPPRPCGIVPARDVCGPVYCFTPSPVVVGTTDRAGAPTYNWGANETDVFVL |
| | NNTRPPLGNWFGCTWMDSTGFTKVCGAPPCVIGGVGNNTLRCPTDCFRKHPD |
| | ATYSRCGSGPWITPRCLVDYPYRLWHYPCTI (SEQ ID NO: 704) |
| KP S16 | ETHVTGGATAHGASVLASLLTTGAKQNIQLINTNGSWHINRTALNCNDSLHT |
| | GFIAGLFYYNKFNSSGCPERLASCRRLDDFAQGWGPISHVNVSGPGERPYCW |
| | HYPPRPCGIVPARDVCGPVYCFTPSPVVVGTTDRAGAPTYNWGANETDVFVL |
| | NNTRPPLGNWFGCTWMNSTGFTKVCGALPCVIGGVGNNTLRCPTDCFRKHPD |
| | ATYSRCGSGPWITPRCLVDYPYRLWHYPCTI (SEQ ID NO: 705) |
| KP R8 | ETHVTGGATAHGASVLASLLTTGAKQNIQLINTNGSWHINRTALNCNDSLHT |
| | GFIAGLFYYNKFNSSGCPERLASCRRLDDFAQGWGPISHVNVSGPGERPYCW |
| | HYPPRPCGIVPARDVCGPVYCFTPSPVVVGTTDRAGAPTYNWGANETDVFVL |
| | NNTRPPLGNWFGCTWMNSTGFTKVCGAPPCVIGGVGSNTLRCPTDCFRKHPD |
| | ATYSRCGSGPWITPRCLVDYPYRLWHYPCTI (SEQ ID NO: 706) |
| KP S20 | ETHVTGGATAHGASVLASLLTTGAKQNIQLINTNGSWHVNRTALNCNDSLHT |
| | GFIAGLFYYNKFNSSGCPERLASCRRLDDFAQGWGPISHVNVSGPGERPYCW |
| | HYPPRPCGIVPARDVCGPVHCFTPSPVVVGTTDRAGAPTYNWGANETDVFVL |
| | NNTRPPLGNWFGCTWMNSTGFTKVCGAPPCVIGGVGNNTLRCPTDCFRKHPD |
| | ATYSRCGSGPWITPRCLVDYPYRLWHYPCTI (SEQ ID NO: 707) |
| KP S4 | ETHVTGGATAHGASVLASLLTTGAKQNIQLINTNGSWHINRTALNCNDSLHT |
| | GFIVGLFYYNKFNSSGCPERLASCRRLDDFAQGWGPISYVNVSGPGERPYCW |
| | HYPPRPCGIVPARDVCGPVYCFTPSPVVVGTTDRAGAPTYNWGANETDVFVL |
| | NNTRPPLGNWFGCTWMNSTGFTKVCGAPPCVIGGVGNNTLRCPTDCFRKHPD |
| | ATYSRCGSGPWITPRCLVDYPYRLWHYPCTI (SEQ ID NO: 708) |
| KP R3 | ETHVTGGATAHGASVLASLLTTGAKQNIQLINTNGSWHINRTALNCNDSLHT |
| | GFIAGLFYYNKFDSSGCPERLASCRRLDDFAQGWGPISYVNVSGPGERPYCW |
| | HYPPRPCGIVPARDVCGPVYCFTPSPVVVGTTDRAGAPTYNWGANETDVFVL |
| | NNTRPPLGNWFGCTWMNSTGFTKVCGAPPCVIGGVGNNTLRCPTDCFRKHPD |
| | ATYSRCGSGPWITPRCLVDYPYRLWHYPCTI (SEQ ID NO: 709) |
| KP S3 | ETHVTGGATAHGASVLASLLTTGAKQNIQLINTNGSWHINRTALNCNDSLHT |
| | GFIAGLFYYNKFDSSGCPERLASCRRLDDFAQGWGPISYVNVSGPGERPYCW |
| | HYPPRPCGIVPARDVCGPVYCFTPSPVVVGTTDRAGAPTYNWGANETDVFVL |
| | NNTRPPLGNWFGCTWMNSTGFTKVCGAPPCDIGGVGNNTLRCPTDCFRKHPD |
| | ATYSRCGSGPWITPRCLVDYPYRLWHYPCTI (SEQ ID NO: 710) |
| KP S12 | ETHVTGGATAHGASVLASLLTPGAKQHVQLINTNGSWHINRTALNCNDSLHT |
| | GFIAGLFYYNKFDSSGCPERLASCRRLDDFAQGWGPISYVNVSGPGERPYCW |
| | HYPPRPCGIVPARDVCGPVYCFTPSPVVVGTTDRAGAPTYNWGANETDVFVL |
| | NNTRPPLGNWFGCTWMNSTGFTKVCGAPPCVIGGVGNNTLRCPTDCFRKHPD |
| | ATYSRCGSGPWITPRCLVDYPYRLWHYPCTI (SEQ ID NO: 711) |
| KP S15 | ETHVTGGATAHGASVLASLLTPGAKQNIQLINTNGSWHINRTALNCNDSLHT |
| | GFVAGLFYYNKFDSSGCPERLASCRRLDDFAQGWGPISHVNVSGPGERPYCW |
| | HYPPRPCGIVPARDVCGPVYCFTPSPVVVGTTDRAGAPTYNWGANETDVFVL |
| | NNTRPPLGNWFGCTWMNSTGFTKVCGAPPCVIGGVGNNTLRCPTDCFRKHPD |
| | ATYSRCGSGPWITPRCLVDYPYRLWHYPCTI (SEQ ID NO: 712) |
| KP S5 | ETHVTGGATAHGASVLASLLTPGAKQNIQLINTNGSWHINRTALNCNDSLHT |
| | GFIAGLFYYNKFDSSGCLERLASCRRLDDFAQGWGPISHVNVSGPGERPYCW |
| | HYPPRPCGIVPARDVCGPVYCFTPSPVVVGTTDRAGAPTYNWGANETDVFVL |
| | NNTRPPLGNWFGCTWMNSTGFTKVCGAPPCAIGGVGNNTLRCPTDCFRKHPD |
| | ATYSRCGSGPWITPRCLVDYPYRLWHYPCTI (SEQ ID NO: 713) |
| KP R7 | ETHVTGGATAHGASVLASLLTPGAKQNIQLINTNGSWHINRTALNCNDSLHT |
| | GFIAGLFYYNKFNSSGCPERLASCRRLDDFAQGWGPISHVNVSGPGERPYCW |
| | HYPPRPCGIVPARDVCGPVYCFTPSPVVVGTTDRAGAPTYNWGANETDVFVL |
| | NNTRPPLGNWFGCTWMNSTGFTKVCGAPPCAIGGVGNNTLRCPTDCFRKHPD |
| | ATYSRCGSGPWITPRCLVDYPYRLWHYPCTI (SEQ ID NO: 714) |
| KP R11 | ETHVTGGATAHGASVLASLLTPGAKQNIQLINTNGSWHINRTALNCNDSLHT |
| | GFIAGLFYYNKFNSSGCPERLASCRRLDDFAQGWGPISHVNVSGPGERPYCW |
| | HYPPRPCGIVPARDVCGPVYCFTPSPVVVGTTDRAGAPTYNWGANETDVFVL |
| | NNTRPPLGNWFGCTWMNTTGFTKVCGAPSCVIGGVGNNTLRCPTDCFRKHPD |
| | ATYSRCGSGPWITPRCLVDYPYRLWHYPCTI (SEQ ID NO: 715) |
| KP R1 | ETHVTGGATAHGASVLASLLTPGAKQNIQLINTNGSWHINRTALNCNDSLHT |
| | GFIAGLFYYNKFNSSGCPERLASCRRLDDFAQGWGPISHVNVSGPGERPYCW |
| | HYPPRPCGIVPARDVCGPVYCFTPSPVVVGTTDRAGAPTYNWGANETDVFVL |
| | NNTRPPLGNWFGCTWMNTTGFTKVCGAPPCVIGGVGNNTLRCPTDCFRKHPD |
| | ATYSRCGSGPWITPRCLVDYPYRLWHYPCTI (SEQ ID NO: 716) |
| KP R12 | ETHVTGGATAHGASVLASLLTPGAKQNIQLINTNGSWHINRTALNCNDSLHT |
| | GFIAGLFYYNKFNSSGCPERLASCRRLDDFAQGWGPISHVNVSGPGERPYCW |
| | HYPPRPCGIVPARDVCGPVYCFTPSPVVVGTTDRAGAPTYNWGANETDVFVL |
| | NNTRPPLGNWFGCTWMNSTGFTKVCGAPPCVIGGVGNNTLRCPTDCFRKHPD |
| | ATYSRCGSGPWITPRCLVDYPYRLWHYPCTI (SEQ ID NO: 717) |
| KP S7 | ETHVTGGATAHGASVLASLLTPGAKQNIQLINTNGSWHINRTALNCNDSLHT |
| | GFIAGLFYYNKFNSSGCPERLASCRRLDDFAQGWGPISHVNVSGPGERPYCW |
| | HYPPRPCGIVPARDVCGPVYCFTPSPVVVGTTDRAGAPTYNWGANETDVFVL |
| | NNTRPPLGNWFGCTWMNSTGFTKVCGAPPCVIGGVGNNTLRCPTDCFRKHPD |
| | ATYSRCGSGPCITPRCLVDYPYRLWHYPCTI (SEQ ID NO: 718) |
| KP R15 | ETHVTGGATAHGASVLTSLLTTGAKQNIQLINTNGSWHINRTALNCNDSLHT |
| | GFIAGLFYYNKFNSSGCPERLASCRRLDDFAQGWGPISHVNVSGPGERPYCW |
| | HYPPRPCGIVPARDVCGPVYCFTPSPVVVGTTDRAGAPTYNWGANETDIFVL |
| | NNTRPPLGNWFGCTWMNSTGFTKVCGAPPCVIGGVGNNTLRCPTDCFRKHPD |
| | ATYSRCGSGPWITPRCLVDYPYRLWHYPCTI (SEQ ID NO: 719) |
| KP R18 | ETYVTGGATAHGASVLASLLTTGAKQNIQLINTNGSWHINRTALNCNDSLHT |
| | GFIAGLFYYNKFNSSGCPERLASCRRLDDFAQGWGPISHVNVSGPGERPYCW |
| | HYPPRPCGIVPARDVCGPVYCFTPSPVVVGTTDRAGAPTYNWGANETDVFVL |
| | NNTRPPLGNWFGCTWMNSTGFTKVCGAPPCVIGGVGNNTLRCPTDCFRKHPD |
| | ATYSRCGSGPWITPRCLVDYPYRLWHYPCTI (SEQ ID NO: 720) |
| KP S11 | ETHVTGGATAHGASVFASLLTTGAKQNIQLINTNGSWHINRTALNCNDSLHT |
| | GFIAGLFYYNKFNSSGCPERLASCRRLDDFAQGWGPISHVNVSGPGERPYCW |
| | HYPPRPCGIVPARDVCGPVYCFTPSPVVVGTTDRAGAPTYNWGANETDVFVL |
| | NNTRPPLGNWFGCTWMNSTGFTKVCGAPPCVIGGVGNNTLRCPTDCFRKHPD |
| | ATYSRCGSGPWITPRCLVDYPYRLWHYPCTI (SEQ ID NO: 721) |
| KP R20 | ETHVTGGATAHGASVFASLLTTGAKQNIQLINTNGSWHINRTALNCNDSLHT |
| | GFIAGLFYYNKFDSSGCPERLASCRRLDDFAQGWGPISHVNVSGPGERPYCW |
| | HYPPRPCGIVPARDVCGPVYCFTPSPVVVGTTDRAGAPTYNWGANETDVFVL |
| | NNTRPPLGNWFGCTWMNSTGFTKVCGAPPCVIGGVGNNTLRCPTDCFRKHPD |
| | ATYSRCGSGPWITPRCLVDYPYRLWHYPCTI (SEQ ID NO: 722) |
| H77 | ETHVTGGSAGRTTAGLVGLLTPGAKQNIQLINTNGSWHINSTALNCNESLNT |
| | GWLAGLFYQHKFNSSGCPERLASCRRLTDFAQGWGPISYANGSGLDERPYCW |
| | HYPPRPCGIVPAKSVCGPVYCFTPSPVVVGTTDRSGAPTYSWGANDTDVFVL |
| | NNTRPPLGNWFGCTWMNSTGFTKVCGAPPCVIGGVGNNTLLCPTDCFRKHPE |
| | ATYSRCGSGPWITPRCMVDYPYRLWHYPCTI (SEQ ID NO: 723) |
| UKN1b12.16 | RTRTTGGSAAQTTYGLTSLFRSGPSQKIQLVNTNGSWHINRTALNCNDSLNT |
| | GFLAALFYVRNFNSSGCPERMASCRPIDTFDQGWGPITYTEPHSLDQRPYCW |
| | HYAPQPCGIVPAAQVCGPVYCFTPSPVVVGTTDRFGAPTYTWGENETDVLIL |
| | NNTRPPQGNWFGCTWMNGTGFTKTCGGPPCNIGGAGNNTLICPTDCFRKHPE |
| | ATYTRCGSGPWLTPRCMVDYPYRLWHYPCTV (SEQ ID NO: 724) |

The alignment of these sequences are shown in FIG. 6. Infection was monitored by assessing serum viral load up to 6 weeks after inoculation (see FIG. 5). Protection in this mouse model is defined as the absence of serum HCV RNA as detected by quantitative PCR at or after 6 days post virus challenge. All mice in the control group (n=4) were infected, and serum viral load was maintained at >10,000 RNA copies/mL until the completion of the study. In mice that received mAb AR3A (n=5) or AR3B (n=4), HCV was detected the day after challenge in five of nine mice, but was cleared 6 days after virus challenge. High levels of HCV RNA were detected in four mice between weeks 2 and 4, indicating virus replication concurrent with the decay of antibody in these mice. By week 6, when the mAbs would have decayed to <10% of the initial serum level, two of five mice receiving mAb AR3A and three of four mice receiving mAb AR3B were still protected. The protection was highly significant compared to the isotype control antibody group (two-tailed log-rank test: AR3A, P=0.0298; AR3B, P=0.0171). The experiments ended at week 6 because two mice became morbid and were killed on day 41 and day 45, respectively, but the remaining mice were monitored to week 8, and a signal below the sensitivity of the quantitative PCR assay (6.0×10² international units/mL) was noted in one additional mouse in each neutralizing antibody-treated group (mice N681 and N697).

[0451] In summary, (i) it is possible to use mAbs against AR3 to protect against challenge with a heterologous HCV quasispecies swarm, consistent with the notion that AR3 is the principal conserved neutralizing antibody determinant of HCV; (ii) high concentrations of the mAbs were required for protection, suggesting that more potent antibody preparations will likely be required in immunotherapy, but that the mAbs described will be useful for comparative in vitro studies with newly identified mAbs and combinations of mAbs; and (iii) considering that one-third of the 115 phage-Fab clones isolated in this study are AR3 specific and are diverse in their heavy-chain sequences, and similar mAbs were isolated from different HCV-infected donors elsewhere (Keck, Z. Y. et al. J. Virol. 78, 9224-9232 (2004)), AR3 seems to be relatively immunogenic in humans and thus a favorable target for vaccine design. So, despite the enormous diversity of HCV, the prospects for developing a vaccine against this virus, that may target both conserved B and T cell epitopes (Elmowalid, G. A. et al. Proc. Natl. Acad. Sci. USA 104, 8427-8432 (2007); Folgori, A. et al. Nat. Med. 12, 190-197 (2006)), seem favorable.

### Example 3

### Isolation and Characterization of Additional Monoclonal Antibodies

[0452] Using epitope-masking/panning of phage-display. Fab library as described in Example 1, about twenty new monoclonal antibodies with unique properties were isolated. In this experiment, E1E2 complex masked with AR1- and AR3-antibodies was used as a panning antigen. First, E1E2 complex from isolate H77 produced by transient transfection of 293T cells was captured by MAb AR3A onto microwells. MAb AR3A binds only folded E2 and neutralizes HCVpp. Second, a saturating concentration of MAb AR1B antibody was added to the captured E1E2 to block all AR1 sites on the complex. The AR3-captured and AR1-masked E1E2 complex was used in library panning and ˜200 Fab clones obtained from the 3rd and 4th rounds of panning were analyzed for specific reactivity to unmasked E1E2 and a total of 29 clones were found to bind E1E2 of isolate H77 (genotype 1a) and 7 of those also cross-reacted with isolate J6 (genotype 2a) (data not shown). DNA sequence analysis revealed 19 unique antibody sequences, none of which has the same sequence found in the antibody panel we isolated previously. According to heavy chain sequences, the Fabs were sorted into 9 groups. The heavy and light chain amino acid sequences of these nineteen antibodies are shown in the tables below.

TABLE 18A
Fab Heavy Chain Sequences

| Fab | FRAMEWORK 1 | CDR1 |
|---|---|---|
| N1 | EVQLLEQSGPEVKKPGDSLRISCKMSGDSLV | TTWIG |
| | (SEQ ID NO: 835) | (SEQ ID NO: 725) |
| N2 | EVQLLEQSGPEVKKPGDSLRISCKMSGDSLV | TTWIG |
| | (SEQ ID NO: 836) | (SEQ ID NO: 726) |
| N3 | EVQLLEQSGAEVKKPGDSLRISCKMSGDSLV | WIG |
| | (SEQ ID NO: 837) | (SEQ ID NO: 983) |
| N4 | EVQLLEQSGPEVKKPGDSLRISCKMSGDSLV | TTWIG |
| | (SEQ ID NO: 838) | (SEQ ID NO: 727) |
| O1 | EVQLLEQSGAEVKKAGESVRLSCKASGYRFG | DYWIA |
| | (SEQ ID NO: 839) | (SEQ ID NO: 728) |
| P1 | EVQLLE SGGGVVQPGGSLRLSCAASGFTFT | SFTMH |
| | (SEQ ID NO: 840) | (SEQ ID NO: 729) |
| P2 | EVQLLE SGGGVVQPGRSLRLSCAASGFTLD | TFTMH |
| | (SEQ ID NO: 841) | (SEQ ID NO: 730) |
| P3 | EVQLLE SGGGVVQPGKSLRLSCAVSGFTLN | TFAMH |
| | (SEQ ID NO: 842) | (SEQ ID NO: 731) |
| P4 | EVQLLE SGGGVVQPGKSLTVSCAASGFTFS | TFTMH |
| | (SEQ ID NO: 843) | (SEQ ID NO: 732) |
| P5 | EVQLLE SGGGVVQPGKSLTVSCAASGFTFS | TFTMH |
| | (SEQ ID NO: 844) | (SEQ ID NO: 733) |
| P6 | EVQLLE SGGGVVQPGKSLTVSCAASGFTFS | TFTMH |
| | (SEQ ID NO: 845) | (SEQ ID NO: 734) |
| Q1 | EVQLLEQSGAEVRKPGASVKVSCKASGYTFT | NNGLN |
| | (SEQ ID NO: 846) | (SEQ ID NO: 735) |
| Q2 | EVQLLEQSGAEVKKPGASVKVSCKASGYTFT | NNGLN |
| | (SEQ ID NO: 847) | (SEQ ID NO: 736) |
| R1 | EVQLLEQSGAEVKKPGASVKVSCKASGYTFS | IYGVA |
| | (SEQ ID NO: 848) | (SEQ ID NO: 737) |
| S1 | EVQLLEQSGAEVKKPGTSVKVSCTASGYIFT | SFGIS |
| | (SEQ ID NO: 849) | (SEQ ID NO: 738) |
| T1 | EVQLLE SGGGLVQPGGSLRLSCAASGFTFS | RFWMH |
| | (SEQ ID NO: 850) | (SEQ ID NO: 739) |
| U1 | EVQLLEQSGPEVKRPGTSVKMSCKISGGASI | TQAMS |
| | (SEQ ID NO: 851) | (SEQ ID NO: 740) |
| V1 | EVQLLEQSGAEVQKPGASVKVSCKPSGYIFT | NFGIS |
| | (SEQ ID NO: 852) | (SEQ ID NO: 741) |

TABLE 18B
Fab Heavy Chain Sequences - Con't

| | | |
|---|---|---|
| Fab | FRAMEWORK 2 | CDR2 |

| | | |
|---|---|---|
| N1 | WVRQKPGQGLEWMG (SEQ ID NO: 853) | IINPGDSSTNIYPGDSATRYGPSFQG (SEQ ID NO: 742) |
| N2 | WVRQKPGQGLEWMG (SEQ ID NO: 854) | IINPGDSSTNIYPGDSATRYGPSFQG (SEQ ID NO: 743) |
| N3 | WVRQKPGQGLEWMG (SEQ ID NO: 855) | IINPGDSATNIYPGDSDTRYGPSFQG (SEQ ID NO: 744) |
| N4 | WVRQKPGQGLEWMG (SEQ ID NO: 856) | IINPGDSSTNIYPGDSATRYGPSFQG (SEQ ID NO: 745) |
| O1 | WVRQLPGRAPEWMG (SEQ ID NO: 857) | IIYPDDSDTKYSPSFQGQVTISADKSI (SEQ ID NO: 746) |
| P1 | WVRQAPGKGLEWVA (SEQ ID NO: 858) | LISHDGSNKDYADSVRG (SEQ ID NO: 747) |
| P2 | WVRQSPGKGLEWVA (SEQ ID NO: 859) | LISHDANNKDYADSVKG (SEQ ID NO: 748) |
| P3 | WVRQVPGKGLEWVA (SEQ ID NO: 860) | LTSHDGSRQDYADSVRG (SEQ ID NO: 749) |
| P4 | WVRQAPGKWLEWVA (SEQ ID NO: 861) | VISHDGGTEHYADSVTG (SEQ ID NO: 750) |
| P5 | WVRQAPGKGLEWVA (SEQ ID NO: 862) | VISHDGGTEHYADSVTG (SEQ ID NO: 751) |
| P6 | WVRQAPGKWLEWVA (SEQ ID NO: 863) | VISHDGGTEHYADSVTG (SEQ ID NO: 752) |
| Q1 | WVRQAPGQGLEWMG (SEQ ID NO: 864) | WISPYNGDTDFAHKFQG (SEQ ID NO: 753) |
| Q2 | WVRQAPGQGLEWMG (SEQ ID NO: 865) | WISPYNGDTDFAHKFQG (SEQ ID NO: 754) |
| R1 | WVRQAPGQGLEWMG (SEQ ID NO: 866) | WISPQNGDTHSPQKFQG (SEQ ID NO: 755) |
| S1 | WVRQAPGQGLEWMG (SEQ ID NO: 867) | RIDTYNGKTNYAQKLQG (SEQ ID NO: 756) |
| T1 | WVRQAPGKGLVWVA (SEQ ID NO: 868) | RINSDGSSTTYADSVKG (SEQ ID NO: 757) |
| U1 | WVRQAPGQGLEWMG (SEQ ID NO: 869) | GITPIFGTVNYAQKILG (SEQ ID NO: 758) |
| V1 | WVRQAPGQGLEWMA (SEQ ID NO: 870) | WINTYNGKTTYAQSLQG (SEQ ID NO: 759) |

TABLE 18C
Fab Heavy Chain Sequences - Con't

| | | | |
|---|---|---|---|
| Fab | FRAMEWORK 3 | CDR3 | FRAMEWORK 4 |

| | | | |
|---|---|---|---|
| N1 | QVTISIDKSTSTAYLQWNAVKPSDTGIYYCAR | HVPVPISGTFLWREREMHDFGYFDD | WGQGTLVIVSS |
| | (SEQ ID NO: 871) | (SEQ ID NO: 760) | (SEQ ID NO: 889) |
| N2 | QVTISIDKSTSTAYLQWNTVKPSDTGIYYCAR | HVPVPISGTFLWREREMHDFGYFDD | WGQGTLVIVSS |
| | (SEQ ID NO: 872) | (SEQ ID NO: 761) | (SEQ ID NO: 890) |
| N3 | QVTISIDKSTSTAYLQWNAVKASDTGIYYCAR | HVPVPISGTFLWREREMHDLGYFDD | WGQGTLVIVSS |
| | (SEQ ID NO: 873) | (SEQ ID NO: 762) | (SEQ ID NO: 891) |
| N4 | QVTISIDKSTSTAYLQWNNVKASDTGIYYCAR | HVPVPISGTFLWREREMHDFGYFDD | WGQGTLVIVSS |
| | (SEQ ID NO: 874) | (SEQ ID NO: 763) | (SEQ ID NO: 892) |
| O1 | RTT FLD WGSLKASDTAIYYCAR | GCLGAKCYYPHYYYGL DV | WGQGTTVIVSS |
| | (SEQ ID NO: 875) | (SEQ ID NO: 764) | (SEQ ID NO: 893) |
| P1 | RFTVSRDNSKKMVYLQMSSLRPDDAAVYYCAR | GGPAYYTYSDTLTGYHNVVG DY | WGQGTLVTVSS |
| | (SEQ ID NO: 876) | (SEQ ID NO: 765) | (SEQ ID NO: 894) |
| P2 | RFTISRDNSKKLVYLQMDSLRSEDTAVYYCAR | GGPAYYLYSDVLTGFHNVVG DY | WGQGTLVTVSA |
| | (SEQ ID NO: 877) | (SEQ ID NO: 766) | (SEQ ID NO: 895) |
| P3 | RFTISRDNSKSMVFLLMNSLRAEDTAVYYCVR | GGPAYYTYNDVLTGYAYVVG DF | WGQGTLVTVSS |
| | (SEQ ID NO: 878) | (SEQ ID NO: 767) | (SEQ ID NO: 896) |
| P4 | RFTISRDNSKNTLHLQMNSLRPEDTAVYFCAR | GGPAYYLYNDVLTGYYNVVG DF | WGQGTLVTVSS |
| | (SEQ ID NO: 879) | (SEQ ID NO: 768) | (SEQ ID NO: 897) |
| P5 | RFTISRDNSKNTLHLQMNSLRPEDTAVYFCAR | GGPAYYLYNDVLTGYYNVVG DF | WGQGTLVTVSS |
| | (SEQ ID NO: 880) | (SEQ ID NO: 769) | (SEQ ID NO: 898) |
| P6 | RFTISRDNSKNTLHMQMNSLRLEDTAVYFCAR | GGPAYYLYNDVLTGYYNVVG DF | WGQGTLVTVSS |
| | (SEQ ID NO: 881) | (SEQ ID NO: 770) | (SEQ ID NO: 899) |
| Q1 | RISMTTDTSTNTAYMELRSLRSDDTAVYYCAR | DRNSAGGTWLFRDPPPGSTFF DS | WGQGSLVTVSS |
| | (SEQ ID NO: 882) | (SEQ ID NO: 771) | (SEQ ID NO: 900) |
| Q2 | RISMTTDTSTNTAYMELRSLRSDDTAVYYCAR | DRNSAGGTWLFRDPPPGSTFF DS | WGQGSLVTVSS |
| | (SEQ ID NO: 883) | (SEQ ID NO: 772) | (SEQ ID NO: 901) |
| R1 | RLTMTTDTSTSTAYMELRSLRSDDTAVYFCAR | DYGVNFGGGSEHNL DY | WGRGTRVTVSS |
| | (SEQ ID NO: 884) | (SEQ ID NO: 773) | (SEQ ID NO: 902) |
| S1 | RVTMTTDTYTSTAYMELRSLTSDDTAVYYCAR | DDCRSSTCYLAQHNWQAYYH DS | WGQGTLVTVSS |
| | (SEQ ID NO: 885) | (SEQ ID NO: 774) | (SEQ ID NO: 903) |
| T1 | RFTISRDNAKNTLYLQMNSLRDEDTAVYFCAR | GGDSSSPYYYPM DV | WGQGTTVAVSS |
| | (SEQ ID NO: 886) | (SEQ ID NO: 775) | (SEQ ID NO: 904) |
| U1 | RVTITADED TVSLELSSLKSEDTAVYYCAR | EVNLKTWNLAHPNVF DV | WGQGTMLTVSS |
| | (SEQ ID NO: 887) | (SEQ ID NO: 776) | (SEQ ID NO: 905) |
| V1 | RVTLTTDPYTNTVFMELRSLRSDDTAVYYCAR | ENEGEYVWGHFRS DY | WGQGTLVTVSS |
| | (SEQ ID NO: 888) | (SEQ ID NO: 777) | (SEQ ID NO: 906) |

TABLE 19A
Fab Light Chain Sequences

| | | |
|---|---|---|
| Fab | FRAMEWORK 1 | CDR1 |

| | | |
|---|---|---|
| N1 | EL TQSPGTLSLSPGERATLSC (SEQ ID NO: 907) | RASQS VSSSYLA (SEQ ID NO: 778) |
| N2 | EL TQSPGTLSLFPGERATLSC (SEQ ID NO: 908) | RASQS ILGRYLA (SEQ ID NO: 779) |
| N3 | EL TQSPGTLSLSPGERATLSC (SEQ ID NO: 909) | RASQS VSSSYLA (SEQ ID NO: 780) |
| N4 | ELTLTQSPGTLSLSPGERATLSC (SEQ ID NO: 910) | RASQS VSNNYLA (SEQ ID NO: 781) |
| O1 | EL TQSPSSLSASVGDRVTITC (SEQ ID NO: 911) | RATQ GIDNYLN (SEQ ID NO: 782) |
| P1 | EL TQSPGTLSLSPGERATLSC (SEQ ID NO: 912) | RASQ VRG FLA (SEQ ID NO: 783) |
| P1a | EL TQSPGTLSLSPGERATLSC (SEQ ID NO: 913) | RTSQS VSSTYLA (SEQ ID NO: 784) |
| P2 | ELVLTQSPGTLSLSPGERATLSC (SEQ ID NO: 914) | RASQS VSSSYLA (SEQ ID NO: 785) |
| P3 | EL TQSPGTLSLSPGERATLSC (SEQ ID NO: 915) | RASQS VSSTYLA (SEQ ID NO: 786) |
| P4 | EL TQSPGTLSLSPGERATLSC (SEQ ID NO: 916) | RASQS VSSSNLA (SEQ ID NO: 787) |
| P5 | EL TQSPASLSLSPGERATLSC (SEQ ID NO: 917) | RASQS V GTYFA (SEQ ID NO: 788) |
| P6 | EL IQSPGTLFLSSGERATLSC (SEQ ID NO: 918) | RASQS VSSSNLA (SEQ ID NO: 789) |
| Q1 | EL TQSPGTLSLSPGERATLSC (SEQ ID NO: 919) | RASQS VSSSYLA (SEQ ID NO: 790) |
| Q2 | EL TQSPASLSLSPGGSATLAC (SEQ ID NO: 920) | RASRG VNS NLA (SEQ ID NO: 791) |
| R1 | EL TQSPLSLPVTPGEPASISC (SEQ ID NO: 921) | RSSYSLLHINGYKYLD (SEQ ID NO: 792) |
| S1 | ELVLTQSPGTLSLSPGERATLSC (SEQ ID NO: 922) | RASQS VSSSYLA (SEQ ID NO: 793) |
| T1 | EL TQSPGTLSLSPGERATLSC (SEQ ID NO: 923) | RASQS VSSSYLA (SEQ ID NO: 794) |
| U1 | EL TQSPSSLSASVGDRVTITC (SEQ ID NO: 924) | RASQS ISSFLN (SEQ ID NO: 795) |
| V1 | EL TQSPSSLSASVGDRVTITC (SEQ ID NO: 925) | QASQD ISNFLN (SEQ ID NO: 796) |

TABLE 19B
Fab Light Chain Sequences - Con't

| Fab | FRAMEWORK 2 | CDR2 |
|---|---|---|
| N1 | WYQQKPGQAPRLLIY | GASNRAA (SEQ ID NO: 797) |
| | (SEQ ID NO: 926) | |
| N2 | WYQQKGGRAPRLLIF | GASKRAT (SEQ ID NO: 798) |
| | (SEQ ID NO: 927) | |
| N3 | WYQQKPGQAPRLLIY | GASSRAT (SEQ ID NO: 799) |
| | (SEQ ID NO: 928) | |
| N4 | WYQQKPGQAPRLLIY | GASSRAT (SEQ ID NO: 800) |
| | (SEQ ID NO: 929) | |
| O1 | WYQQKPGKPPRLLIY | GASSLQS (SEQ ID NO: 801) |
| | (SEQ ID NO: 930) | |
| P1 | WFQQKPGQAPRLLIY | GASNRAP (SEQ ID NO: 802) |
| | (SEQ ID NO: 931) | |
| P1a | WYQQKPGQPPRLLIY | GASNRAP (SEQ ID NO: 803) |
| | (SEQ ID NO: 932) | |
| P2 | WYQQKPGQAPRLLIY | GASSRAT (SEQ ID NO: 804) |
| | (SEQ ID NO: 933) | |
| P3 | WYQQKPGQAPRLLIY | GASSRAT (SEQ ID NO: 805) |
| | (SEQ ID NO: 934) | |
| P4 | WFQHKSGRAPRLLIY | GASNRAP (SEQ ID NO: 806) |
| | (SEQ ID NO: 935) | |
| P5 | WYQQKPGQAPRLLIY | GASNRAT (SEQ ID NO: 807) |
| | (SEQ ID NO: 936) | |
| P6 | WFQHKSGRAPRLLIY | GASNRAP (SEQ ID NO: 808) |
| | (SEQ ID NO: 937) | |
| Q1 | WYQQKPGQAPRLLIY | GASSRAT (SEQ ID NO: 809) |
| | (SEQ ID NO: 938) | |
| Q2 | WYHQKPGQAPRLLIY | SASTRAT (SEQ ID NO: 810) |
| | (SEQ ID NO: 939) | |
| R1 | WYLQRPGQSPQLLIY | LGSNRAP (SEQ ID NO: 811) |
| | (SEQ ID NO: 940) | |
| S1 | WYQQKPGQAPRLLIY | GASSRAT (SEQ ID NO: 812) |
| | (SEQ ID NO: 941) | |
| T1 | WYQQKPGQAPRLLIY | GASSRAT (SEQ ID NO: 813) |
| | (SEQ ID NO: 942) | |
| U1 | WYQQKPGKAPKLLIY | AASSLQS (SEQ ID NO: 814) |
| | (SEQ ID NO: 943) | |
| V1 | WYQRRPGKAPNLLIY | DATHLET (SEQ ID NO: 815) |
| | (SEQ ID NO: 944) | |

TABLE 19C
Fab Light Chain Sequences - Con't

| Fab | FRAMEWORK 3 |
|---|---|
| N1 | GIPDRFSGSGSGADFTLTISRLEPEDFAVYYC |
| | (SEQ ID NO: 945) |
| N2 | GIPDRFSGSGSGTDFTLTIGRLEPEDFAVYYC |
| | (SEQ ID NO: 946) |
| N3 | GIPDRFSGSGSGTDFTLTISRLEPEDFAVYYC |
| | (SEQ ID NO: 947) |
| N4 | GIPDRFSGSGSGTGFTLIISRLEPEDFAVYYC |
| | (SEQ ID NO: 948) |
| O1 | GVPSRFSGGGSGTHFTLTITNLQPEDFATYYC |
| | (SEQ ID NO: 949) |
| P1 | GIPDRFSGSGSGTDFTLTISRLEPEDFAVYYC |
| | (SEQ ID NO: 950) |
| P1a | GIPDRFSGSGSGTDFTLTISRLEPEDFAVYYC |
| | (SEQ ID NO: 951) |
| P2 | GIPDRFSGSGSGTDFTLTISRLEPEDFAVYYC |
| | (SEQ ID NO: 952) |
| P3 | GIPDRFSGSGSGTDFTLTISRLEPEDFAVYYC |
| | (SEQ ID NO: 953) |
| P4 | DIPDRFSGSGSGTDFTLSISRLEPEDFAVYYC |
| | (SEQ ID NO: 954) |
| P5 | GIPDRFSGSGSGTDFTLTVSRLEPEDFAVYYC |
| | (SEQ ID NO: 955) |
| P6 | DIPDRFSGSGSGTDFTISISRLEPEDFAVYYC |
| | (SEQ ID NO: 956) |
| Q1 | GIPDRFSGSGSGTDFTLTISRLEPEDFAVYYC |
| | (SEQ ID NO: 957) |
| Q2 | GIPGRFSGSGFGTEFTLTINNLQSDDFGVYYC |
| | (SEQ ID NO: 958) |
| R1 | GVPDRFSGSGSGTSFTLKISRVEAEDVGVYYC |
| | (SEQ ID NO: 959) |
| S1 | GIPDRFSGSGSGTDFTLTISRLEPEDFAVYYC |
| | (SEQ ID NO: 960) |
| T1 | GIPDRFSGSGSGTDFTLTISRLEPEDFAVYYC |
| | (SEQ ID NO: 961) |
| U1 | GVPPRFSGSGSGTDFTLTISSLQPEDFATYYC |
| | (SEQ ID NO: 962) |
| V1 | GVPSRFSGSGFGTHFTLTINSLQPEDIGTYYC |
| | (SEQ ID NO: 963) |

TABLE 19D
Fab Light Chain Sequences - Con't

| | | |
|---|---|---|
| Fab | CDR3 | FRAMEWORK 4 |

| | | |
|---|---|---|
| N1 | QQYGSSL IT (SEQ ID NO: 816) | FGQGTRLEIKRT (SEQ ID NO: 964) |
| N2 | QHYGSS IT (SEQ ID NO: 817) | FGQGTRLDIKRT (SEQ ID NO: 965) |
| N3 | QQYGSSL T (SEQ ID NO: 818) | FGGGTKVEIKRT (SEQ ID NO: 966) |
| N4 | QQYGSSS IT (SEQ ID NO: 819) | FGQGTRLEIKRT (SEQ ID NO: 967) |
| O1 | QQSYSTPPET (SEQ ID NO: 820) | FGQGTKVEIKRT (SEQ ID NO: 968) |
| P1 | QQYGDSPPIT (SEQ ID NO: 821) | FGQGTRLEIKRT (SEQ ID NO: 969) |
| P1a | QQYGDSPPIT (SEQ ID NO: 822) | FGQGTRLDIKRT (SEQ ID NO: 970) |
| P2 | QQYGDSPP F (SEQ ID NO: 823) | FGPGTKVDIKRT (SEQ ID NO: 971) |
| P3 | QQYGSSP LT (SEQ ID NO: 824) | FGGGTKVEIKRT (SEQ ID NO: 972) |
| P4 | QRYGDSPPIT (SEQ ID NO: 825) | FGQGTRLEIKRT (SEQ ID NO: 973) |
| P5 | QQYGSSP T (SEQ ID NO: 826) | FGQGTKVEIKRT (SEQ ID NO: 974) |
| P6 | QRYGDSPPIT (SEQ ID NO: 827) | FGQGTRLEIKRT (SEQ ID NO: 975) |
| Q1 | QQYGSSP QT (SEQ ID NO: 828) | FGQGTKVEIKRT (SEQ ID NO: 976) |
| Q2 | QQYDDTPQIT (SEQ ID NO: 829) | FGQGTRLDIKRL (SEQ ID NO: 977) |
| R1 | MQSLQAP WT (SEQ ID NO: 830) | FGQGTKVEMKRT (SEQ ID NO: 978) |
| S1 | QQYGSSP QT (SEQ ID NO: 831) | FGQGTKVEIKRT (SEQ ID NO: 979) |
| T1 | QQYGSSP QT (SEQ ID NO: 832) | FGQGTKVEIKRT (SEQ ID NO: 980) |
| U1 | QQSYSTP RT (SEQ ID NO: 833) | FGQGTKLEIKRT (SEQ ID NO: 981) |
| V1 | QHFDDVPSFT (SEQ ID NO: 834) | FGPGTKVDLKRT (SEQ ID NO: 982) |

[0453] The relation of the new Fabs to AR1-, AR2- and AR3-MAbs was determined by competition ELISA. Briefly, E1E2 antigens (H77) were captured by lectin onto microwells, and then blocked with undiluted soluble Fabs for 30 minutes before the addition of AR1-, AR2-, and AR3-specific MAbs, or the murine MAb A4, which is specific for a linear E1 epitope (residues 197-207). Bound IgG was detected either with HRP-conjugated anti-human Fcγ or anti-mouse Fcγ. The change of binding signals of the MAbs comparing a control Fab was calculated and tabulated. Fab P 1a has the same heavy chain but a different light chain compared to Fab P1. Tables 20A and B, set forth the results. Residual binding levels of between 0-25% are indicated in bold italic font; residual binding levels of between 51-75% are indicated in bold font; residual binding levels of between 76-150% are indicated in normal font; and residual binding levels of greater than 151% are indicated in italic font.

TABLE 20A

| Binding | Blocking Fab | | | | | | | | | |
|---|---|---|---|---|---|---|---|---|---|---|
| MAb | N1 | N2 | N3 | N4 | O1 | P1 | P1a | P2 | P3 | P4 |
| A4 | 100 | 101 | 96 | 100 | 96 | 101 | 100 | 102 | 100 | 98 |
| AR1A | 83 | 82 | 71 | 94 | 76 | 86 | 88 | 91 | 85 | 85 |
| AR1B | 95 | 100 | 92 | 95 | 95 | 97 | 100 | 99 | 93 | 95 |
| AR2A | 85 | 86 | 69 | 74 | 88 | 82 | 82 | 82 | 72 | 79 |
| AR3A | 118 | 76 | 60 | 111 | 92 | 79 | 113 | 133 | 133 | 128 |
| AR3B | 178 | 122 | 136 | 116 | 89 | 187 | 175 | 172 | 141 | 177 |
| AR3C | 146 | 116 | 92 | 112 | 77 | 131 | 145 | 140 | 124 | 155 |
| AR3D | 131 | 98 | 107 | 92 | 83 | 145 | 138 | 138 | 118 | 145 |

TABLE 20B

| Binding | Blocking Fab | | | | | | | | | | |
|---|---|---|---|---|---|---|---|---|---|---|---|
| MAb | P5 | P6 | Q1 | Q2 | R1 | S1 | T1 | U1 | V1 | AR1B | AR2A |
| A4 | 100 | 99 | 95 | 98 | 99 | 100 | 99 | 101 | 99 | 85 | 87 |
| AR1A | 87 | 82 | 79 | 78 | 100 | 69 | 80 | 55 | 58 | [symbol] | 113 |
| AR1B | 95 | 95 | 97 | 96 | 101 | 101 | 102 | 103 | 102 | [symbol] | 105 |
| AR2A | 73 | 76 | 75 | 72 | 75 | 79 | 93 | 132 | 79 | 59 | [symbol] |
| AR3A | 119 | 101 | 113 | 89 | 236 | 203 | 72 | [symbol] | 94 | 202 | 158 |
| AR3B | 143 | 116 | 117 | 97 | 242 | 247 | 124 | [symbol] | 113 | 141 | 115 |
| AR3C | 117 | 103 | 97 | 75 | 163 | 149 | 105 | [symbol] | 82 | 95 | 97 |
| AR3D | 132 | 106 | 86 | 71 | 133 | 100 | 107 | [symbol] | 70 | 65 | 58 |

[0454] Except Fab U1, which competed strongly with AR3MAbs and partially with MAb AR1A, significant competition was not observed for the new Fab panel. Table 21 illustrates the cross-reactivity of the antibodies to diverse HCV isolates. Specific binding of Fabs to E1E2 antigens from a diverse HCV panel also was studied by ELISA. MAb AR3A was included as a positive control (1 μg/mL). Table 21 sets forth the results, which indicate that many of the new Fabs cross-react with E1E2 from diverse HCV genotypes. For example, N1, N2, N3, N4, P2, P5, Q1, S1 and V1 bind well to the E1E2 complexes of many of the HCV isolates tested.

TABLE 21

| | Binding of Fab to E1E2 Ag from different isolates (OD 450 nm) | | | | | | | | | | |
|---|---|---|---|---|---|---|---|---|---|---|---|
| | | UKN | | | | | UKN | UKN | UKN | UKN | UKN |
| Fab | H77 | 1B12.16 | OH8 | CH35 | J6E3 | JFH | 2B1.1 | 3A1.28c | 4.21.16 | 5.15.7 | 6.5.8 |
| N1 | 1.13 | 0.65 | 1.13 | 0.59 | 0.64 | 0.99 | 0.33 | 1.08 | 0.93 | 0.43 | 0.29 |
| N2 | 1.45 | 0.81 | 1.44 | 0.82 | 0.92 | 1.34 | 0.44 | 1.36 | 1.09 | 0.46 | 0.40 |
| N3 | 1.54 | 0.62 | 1.32 | 0.59 | 0.66 | 1.20 | 0.29 | 1.27 | 0.96 | 0.37 | 0.23 |
| N4 | 1.71 | 1.06 | 1.75 | 1.03 | 0.99 | 1.57 | 0.48 | 1.73 | 1.49 | 0.71 | 0.44 |
| O1 | 1.37 | 0.17 | 0.44 | 0.27 | 0.05 | 0 | 0.02 | 0.48 | 0.57 | 0.10 | 0.02 |
| P1 | 1.44 | 0.26 | 0.80 | 0.27 | 0.08 | 0.12 | 0.03 | 0.98 | 0.62 | 0.17 | 0.06 |
| P1a | 0.61 | 0.15 | 0.24 | 0.08 | 0.03 | 0 | 0.00 | 0.18 | 0.04 | −0.04 | 0.05 |
| P2 | 1.42 | 0.59 | 1.00 | 0.47 | 0.60 | 0.88 | 0.18 | 1.05 | 0.78 | 0.25 | 0.22 |
| P3 | 0.58 | 0.20 | 0.36 | 0.11 | 0.11 | 0 | 0 | 0.33 | 0.15 | 0.06 | 0.03 |
| P4 | 1.60 | 0.59 | 1.15 | 0.52 | 0.10 | 0.45 | 0.09 | 1.07 | 0.99 | 0.31 | 0.19 |
| P5 | 1.70 | 0.33 | 1.14 | 0.41 | 0.01 | 0.06 | 0 | 1.22 | 1.00 | 0.19 | 0.10 |
| P6 | 0.61 | 0.26 | 0.46 | 0.21 | 0.02 | 0.00 | 0.13 | 0.37 | 0.23 | 0.08 | 0.12 |
| Q1 | 1.34 | 0.38 | 0.96 | 0.48 | 0.19 | 0.43 | 0.03 | 1.07 | 0.85 | 0.30 | 0.10 |
| Q2 | 0.45 | 0.21 | 0.43 | 0.19 | 0.25 | 0.18 | 0.15 | 0.35 | 0.17 | 0.05 | 0.16 |
| R1 | 1.24 | 0.03 | 0.50 | 0.15 | 0 | 0 | 0.02 | 0 | 0.01 | 0.00 | 0.05 |
| S1 | 1.73 | 0.26 | 1.32 | 0.79 | 0.07 | 0.21 | 0.03 | 0.55 | 1.12 | 0.18 | 0.08 |
| T1 | 0.49 | 0 | 0.15 | 0.00 | 0 | 0 | 0 | 0 | 0.08 | 0.07 | 0.01 |
| U1 | 0.53 | 0.11 | 0.26 | 0.07 | 0.08 | 0.07 | 0.00 | 0.11 | 0.00 | 0.06 | 0.06 |
| V1 | 1.74 | 0.16 | 1.35 | 0.77 | 0.73 | 1.27 | 0.30 | 0.06 | 1.02 | 0.30 | 0.05 |
| AR3A | 1.83 | 1.81 | 1.83 | 1.48 | 1.82 | 1.80 | 1.09 | 1.31 | 1.77 | 0.87 | 1.33 |
| IgG | | | | | | | | | | | |

[0455] Two of the Fabs, N4 and P2, were produced at a larger scale and purified for the study of virus neutralization. Results show that both Fabs neutralized HCVpp-H77, and Fab N4 also cross-neutralized HCVpp-J6. Of note, the neutralizing activity of Fab N4 against HCVpp-H77 is significantly higher than the Fab fragment of MAb AR3A. For example, at a concentration of 0.4 μg/mL, approximately 60% neutralization was observed using Fab N4, compared to about 10% neutralization observed using AR3A or P2. At a higher concentration (2 μg/mL), approximately 85% neutralization was observed using Fab N4; approximately 40% neutralization observed using Fab P2; and approximately 20% neutralization observed using AR3A.

[0456] The properties of N4, Q2 and V1 anti-HCV E1-E2 antibodies presented as full-length IgG molecules were also analyzed in an antibody competition study. In the antibody competition study, the IgG N4, Q2 and V1 antibodies were expressed by transient transfection of 293Freestyle cells. The antibody concentrations in the transfected cell supernatants (5-11 μg/mL) were determined by a sandwich ELISA as described herein, e.g., Example 1. Undiluted cell supernatants containing the new antibodies were incubated with lectin-captured E1E2 antigens before the addition of biotinylated human MAbs or Fab N4. Results are shown in the table below.

TABLE 22

| Binding MAb | Blocking Ab | | |
|---|---|---|---|
| (biotinylated) | IgG N4 | IgG Q2 | IgG V1 |
| MAb AR1A | 92 | 96 | 62 |
| MAb AR1B | 95 | 103 | 100 |
| MAb AR2A | 91 | 100 | 92 |
| MAb AR3A | 114 | 119 | 72 |
| Fab N4 | 18 | 64 | 86 |

The numbers indicate the % residual binding signals of biotinylated antibodies in the presence of blocking MAbs and the extent of competition is highlighted.

These results indicate that two of the new MAbs, i.e. IgG N4 and Q2, recognize epitopes outside the three antigenic regions 1 to 3 of E2 as determined in the antibody competition study. Slight competition with MAbs ARIA and AR3A was observed with MAb IgG V1.

[0457] For the antibody reactivity studies, ELISA-based assays were used to evaluate the binding of the new antibodies to different formats of E1 and E2. E1E2 was prepared from cell lysate of 293T cells transfected with H77 E1E2 cDNA. Soluble E1 and E2 were produced by Drosophila S2 cells. Soluble E2ΔTM was produced by transfection of 293T cells. MAbs AR1-3 and MAb A4 (Dubuisson et al. J. Virol. 68, 6147-60 (1994)) are positive controls for E2 and E1 (linear epitope) binding, respectively. Results of these antibody reactivity studies are summarized in the following table.

TABLE 23

| | | Denatured/ | | Soluble |
|---|---|---|---|---|
| | Folded | reduced | Soluble E1 by | E2ΔTM by |
| Antibody | E1E2 | E1E2 | Drosophila S2 cells | 293T cells |
| MAb AR1A | + | − | − | + |
| MAb AR2A | + | − | − | + |
| MAb AR3A | + | − | − | + |
| N4 | + | − | ? | − |
| V1 | + | − | ? | − |
| MAb A4 | + | + | + | N.D. |

+ and − indicate positive and negative binding, respectively
? indicates same background signal obtained using S2-cell expressed E2
N.D. means not determined

These data indicate that the new MAbs bind folded E1E2 complex, but not denatured/reduced E1E2, misfolded E1 expressed by insect cell-expressed sE2, or soluble E2ΔTM expressed by mammalian cells.

[0458] Antibodies to discontinuous neutralizing epitopes on E1 are not widely known. To confirm these novel HCV epitopes are present on E1, the five N-glycans on E1 of the prototypic HCV isolate H77 were removed individually and the effect of these changes in E1 on antibody binding was investigated. The removal of a N-glycan in a glycoprotein can disturb the local conformation hence changing the binding property of an antibody to its nearby regions. The N-glycosylation motifs in E1 at N196, N209, N234, N305 and N325 were eliminated by replacing the specified asparagines with alanines. Wildtype E1E2 (WT) and the corresponding alanine mutants (xN196A, xN209A, xN234A, xN305A and xN325A) were expressed in 293T cells by transient transfection. These E1E2 antigens were extracted from the transfected cells using Tris buffer (pH 7.4, 140 mM NaCl) supplemented with non-denaturing detergents (Triton X-100 and NP-40). The antigens were diluted serially and then captured onto microwells pre-coated with lectin as described above. Captured E1E2 antigens were then probed with the different antibodies (FIG. 7).

[0459] The results in FIG. 7 show that none of the E1 mutations (xN196A, xN209A, xN234A, xN305A and xN325A) affected the binding of the anti-E2 MAb AR3A to the antigens, confirming that these mutations did not affect the overall expression level of the E1E2 complex and the proper folding of E2 in the transfected cells. Second, the N196A mutation reduced binding of the anti-E1 MAb A4 which recognizes a linear epitope (residues 197-207) next to N196, demonstrating that the removal of the nearby N-glycan adversely affected the binding of MAb A4. Third, reduced binding of antibodies N4, P2, V1 and Q2 was observed for the E1 N-glycan mutants xN196A and xN305A, suggesting that the regions nearby these two N-glycans are involved in forming the discontinuous neutralizing epitopes. The fact that IgG N4 neutralizes two different genotypic HCV strains indicate that it is recognizing a relatively conserved epitope on the E1E2 complex. Therefore, the N4 antibody is a good candidate to use with AR3-specific antibodies in an antibody cocktail to simultaneously target two non-overlapping, conserved neutralizing epitopes on HCV.

### Example 4

### Additional Characterization of N4 IgG and V1 IgG

[0460] To determine the nature of the epitopes recognized by N4 IgG and V1 IgG, a series of E1 and E2 mutants were prepared and used in binding studies.

### A. Generation and Expression of E1 Mutants

[0461] A series of E1 or E2 mutants, set forth in Tables 24 and 25, respectively, was prepared by site directed mutagenesis. Amino acid residues that are relatively conserved among a panel of HCV isolates from diverse genotypes (H77, H, Con1, OH8.1, Ch35.1, UKN1b12.16, JFH-1, J6, UKN2a1.2, UKN2b1.1, UKN3a1.28, UKN4.21.16, UKN5.14.4, UKN5.15.7, UKN6.5.340 and UKN6.5.8) were selected for site-directed mutagenesis to alanine, or from alanine to glycine. Briefly, specific mutations were introduced to the E1E2 expression plasmid pH77.20 with oligonucleotides encoding the corresponding mutations using the QuikChange Lightning Site-Directed Mutagenesis Kit with the following PCR conditions: 95° C., 2 minutes; 18 cycles of 95° C. (20 seconds), 60° C. (10 seconds) and 70° C. (3.5 minutes); and 70° C., 5 min. After removal of the template DNA by Dpn I-digestion, the mutated DNA samples were transformed into chemically-competent E. coli. Mutant DNA plasmids were purified from the bacteria and the desired mutations confirmed by DNA sequencing of the corresponding regions for mutagenesis.

TABLE 24
E1 mutants

| Mutation | SEQ ID NO |
|---|---|
| xN196A/xN209A | 1206 |
| xN196A/xN234A | 1207 |
| xN196A/xN305A | 1208 |
| xN196A/xN325A | 1209 |
| xN305A/xN209A | 1210 |
| xN305A/xN234A | 1211 |
| xN305A/xN325A | 1212 |
| Y192A | 1213 |
| Q193A | 1214 |
| V194A | 1215 |
| R195A | 1216 |
| xN196A | 1217 |
| S198A | 1218 |
| Y201A | 1219 |
| T204A | 1220 |
| N205A | 1221 |
| D206A | 1222 |
| xN209A | 1223 |
| S211A | 1224 |
| I212A | 1225 |
| L221A | 1226 |
| H222A | 1227 |
| P224A | 1228 |
| G225A | 1229 |
| V227A | 1230 |
| P228A | 1231 |
| xN234A | 1232 |
| S236A | 1233 |
| W239A | 1234 |
| P244A | 1235 |
| V246A | 1236 |
| T255A | 1237 |
| L258A | 1238 |
| R259A | 1239 |
| H261A | 1240 |
| D263A | 1241 |
| V266A | 1242 |
| A269G | 1243 |
| S273A | 1244 |
| A274G | 1245 |
| Y276A | 1246 |
| G278A | 1247 |
| D279A | 1248 |
| G282A | 1249 |
| Q289A | 1250 |
| F291A | 1251 |
| T292A | 1252 |
| F293A | 1253 |
| S294A | 1254 |
| P295A | 1255 |
| R296A | 1256 |
| H298A | 1257 |
| Q302A | 1258 |
| xN305A | 1259 |
| S307A | 1260 |
| Y309A | 1261 |
| G311A | 1262 |
| T314A | 1263 |
| G315A | 1264 |
| H316A | 1265 |
| R317A | 1266 |
| M318A | 1267 |
| A319G | 1268 |
| W320A | 1269 |
| D321A | 1270 |
| M322A | 1271 |
| M323A | 1272 |
| M324A | 1273 |
| xN325A | 1274 |
| W326A | 1275 |
| S327A | 1276 |
| P328A | 1277 |
| T329A | 1278 |
| R339A | 1279 |
| P341A | 1280 |
| D346A | 1281 |
| G350A | 1282 |
| H352A | 1283 |
| W353A | 1284 |
| G354A | 1285 |

TABLE 25
Additional E2 mutants

| Mutation | SEQ ID NO |
|---|---|
| T425A | 1286 |
| L427A | 1287 |
| N428A | 1288 |
| T435A | 1289 |
| G436A | 1290 |
| A439A | 1291 |
| L441A | 1292 |
| F442A | 1293 |
| Y443A | 1294 |
| F447A | 1295 |
| N448A | 1296 |
| R614A | 1297 |
| R617A | 1298 |
| Y618A | 1299 |
| P619A | 1300 |
| T621A | 1301 |
| N623A | 1302 |
| Y624A | 1303 |
| R630A | 1304 |
| G634A | 1305 |
| G635A | 1306 |
| E637A | 1307 |
| H638A | 1308 |
| R639A | 1309 |
| A642G | 1310 |
| A643G | 1311 |

### B. Infectivity of the E1 and E2 Mutants

[0462] To investigate the effect of the mutations on the folding and function of the E1E2 complex, the mutant plasmids were co-transfected into 293T cells with the pNL4-3.lucR-E-plasmid to generate HCV pseudotype virus particles (HCVpp). A wildtype HCVpp H77.20 control also was generated. The pNL4-3.lucR-E-plasmid encodes a replication-defective HIV-1 genome for pseudotype virus particle packaging and a luciferase reporter gene for virus infectivity determination (Connor et al. (1195) Virology 206, 935-44). To determine the infectivity of the mutants, the supernatants from the transfected cells were harvested 3 days post-transfection and added to Huh7 cell monolayers to allow for a single-round infection. The infected Huh7 cells were lysed and the viral infectivity determined using a firefly luciferase assay system (Promega), according to the manufacturer's instructions. Tables 26 and 27 show the infectivity of the HCVpp containing modified E1 and modified E2 polypeptides. In many instances, infectivity was significantly reduced, suggesting that the mutation affected correct folding of the E1/E2 complex. In some instances, infectivity was significantly increased. For example, HCVpp containing the E1 mutants F293A, P295A, T314A or H316A showed increased infectivity compared to the HCVpp H77.20 wild type control. These mutants were tested in a separate experiment, which indicated that HCVpp containing F293A or P295A exhibited an approximate 5-fold increase in infectivity compared to HCVpp H77.20, and HCVpp containing T314A or H316A exhibited an approximate 3-fold increase in infectivity compared to HCVpp H77.20.

TABLE 26
Infectivity of HCVpp containing E1 mutants

| | Infectivity | | Infectivity | | Infectivity | | Infectivity |
|---|---|---|---|---|---|---|---|
| Mutant | (% of wt) | Mutant | (% of wt) | Mutant | (% of wt) | Mutant | (% of wt) |
| N196A/ | 3 | L221A | 10 | Y276A | 140 | R317A | 169 |
| N209A | | | | | | | |
| N196A/ | 7 | H222A | 8 | G278A | 5 | M318A | 3 |
| N234A | | | | | | | |
| N196A/ | 4 | P224A | 158 | D279A | 5 | A319G | 90 |
| N305A | | | | | | | |
| N196A/ | 11 | G225A | 119 | G282A | 13 | W320A | 35 |
| N325A | | | | | | | |
| N305A/ | 3 | V227A | 175 | Q289A | 18 | D321A | 11 |
| N209A | | | | | | | |
| N305A/ | 7 | P228A | 12 | F291A | 26 | M322A | 21 |
| N234A | | | | | | | |
| N305A/ | 38 | N234A | 148 | T292A | 106 | M323A | 7 |
| N325A | | | | | | | |
| Y192A | 260 | S236A | 25 | F293A | 794 | M324A | 156 |
| Q193A | 43 | W239A | 6 | S294A | 269 | xN325A | 257 |
| V194A | 184 | P244A | 40 | P295A | 1291 | W326A | 4 |
| R195A | 177 | V246A | 66 | R296A | 8 | xS327A | 94 |
| N196A | 18 | T255A | 278 | H298A | 4 | P328A | 6 |
| S198A | 39 | L258A | 103 | Q302A | 4 | T329A | 11 |
| Y201A | 5 | R259A | 2 | N305A | 16 | R339A | 13 |
| T204A | 11 | H261A | 12 | S307A | 15 | P341A | 16 |
| N205A | 8 | D263A | 163 | Y309A | 4 | D346A | 129 |
| D206A | 17 | V266A | 45 | G311A | 5 | G350A | 44 |
| N209A | 14 | A269G | 70 | T314A | 508 | H352A | 4 |
| S211A | 24 | S273A | 22 | G315A | 5 | W353A | 21 |
| I212A | 5 | A274G | 60 | H316A | 941 | G354A | 57 |

TABLE 27
Infectivity of HCVpp containing E2 mutants

| | Infectivity | | Infectivity | | Infectivity | | Infectivity |
|---|---|---|---|---|---|---|---|
| Mutant | (% of wt) | Mutant | (% of wt) | Mutant | (% of wt) | Mutant | (% of wt) |
| T425A | 3 | F442A | 4 | Y618A | 3 | G634A | 3 |
| L427A | 7 | Y443A | 4 | P619A | 3 | G635A | 3 |
| N428A | 14 | F447A | 6 | T621A | 2 | E637A | 3 |
| T435A | 104 | xN448A | 6 | xN623A | 1 | H638A | 6 |
| G436A | 12 | R614A | 4 | Y624A | 2 | R639A | 4 |
| A439G | 35 | H617A | 14 | R630A | 2 | A642G | 4 |
| L441A | 33 | | | | | A643G | 4 |

### C. Binding of the Antibodies to the E1 and E2 Mutants

[0463] To determine which residues are important for binding of N4 IgG and V1 IgG to the E1/E2 complex, the ability of these antibodies to bind to the mutants described above was assessed. The anti-E2 antibody, MAb AR3A, and the mouse anti-E1 A4 antibody, which binds a linear epitope from residues 197-207, were included as controls.

[0464] The transfected 293T cells from Example 4B, above, were solubilized in a non-denaturing lysis buffer (25 mM Tris-HCl, 1% Triton X-100, 0.5% Nonidet-P40 and 140 mM NaCl, pH 7.6) to prepare the mutant E1E2 complex antigens for antibody binding analysis. The dissolved E1E2 antigens were first captured to microwells by Galanthus nivalis lectin pre-coated onto the surface of ELISA plates. After blocking with 1% non-fat milk in phosphate-buffered saline, test antibodies at 1 μg/ml were added to the captured E1E2, followed by the horse radish peroxidase (HRP)-conjugated secondary antibodies and the TMB colorimetric substrate (ThermoScientific) for detecting bound antibodies.

[0465] Tables 28 and 29 set forth the binding of the antibodies to the E1E2 complexes containing the E1 or E2 mutants, respectively. Mutation of some residues in E1 appeared to significantly reduce the ability of N4 IgG and V1 IgG to bind. For example, the binding of both antibodies to E1/E2 complexes containing the N196A/N209A, N196A1N234A, N196A/N305A, N196A/N325A, N305A/N209A, or N305A/N234A double mutation, or Y201A, T204A, N205A, D206A or Q302A single mutation in the E1 polypeptide was significantly reduced compared to the binding of these antibodies to E1/E2 complexes containing wild-type E1. Furthermore, mutation of A439G, L441A, F442A, Y443A, R614A, H617A or H638A, and A439G, L441A, F442A, Y443A, F447A, N448A, R614A, H617A, R630A, or R639A, in the E2 polypeptide also significantly reduced the ability of N4 IgG and V1 IgG, respectively, to bind to E1/E2 complex. The data show that the folding and function of the E1/E2 complex is highly complicated and inter-dependent. It is unclear however, whether these residues are directly involved in forming the two non-overlapping discontinuous epitopes recognized by N4 and V1, or if they are just important for correct folding of the E1 and E2 polypeptides in the context of the E1/E2 complex. Correct folding of the E1/E2 are found to be critical for the binding of both N4 and V1, as many of the mutations in the E2 polypeptide also significantly reduced binding of these antibodies to the E1/E2 complex. The relatively conserved residues described above are found to be important for the formation of fully functional, natively folded E1/E2 complex. The N4 IgG and V1 IgG recognize two previous undescribed discontinuous epitopes on the E1/E2 complex, that are different to the epitopes located at antigenic regions (AR) 1, 2 and 3 described herein (see Example 1) and elsewhere (Law et al., (2008) Nature Med. 14:25-27).

TABLE 28
Binding of Na4 IgG and V1 IgG to E1E2 complexes containing E1 mutants

| | Binding relative to wt (%) | | | | | Binding relative to wt (%) | | | |
|---|---|---|---|---|---|---|---|---|---|
| | Mab | A4 | N4 | V1 | | Mab | A4 | N4 | V1 |
| | AR3A | mouse | IgG | IgG | | AR3A | mouse | IgG | IgG |
| N196A/ | 103 | 51 | 21 | 13 | Y276A | 79 | 82 | 103 | 97 |
| N209A | | | | | | | | | |
| N196A/ | 84 | 71 | 32 | 23 | G278A | 67 | 58 | 68 | 88 |
| N234A | | | | | | | | | |
| N196A/ | 78 | 69 | 4 | 6 | D279A | 43 | 28 | 31 | 36 |
| N305A | | | | | | | | | |
| N196A/ | 116 | 64 | 54 | 39 | G282A | 83 | 50 | 128 | 102 |
| N325A | | | | | | | | | |
| N305A/ | 107 | 117 | 17 | 13 | Q289A | 65 | 49 | 94 | 98 |
| N209A | | | | | | | | | |
| N305A/ | 81 | 109 | 30 | 21 | F291A | 120 | 67 | 131 | 109 |
| N234A | | | | | | | | | |
| N305A/ | 87 | 114 | 74 | 95 | T292A | 92 | 90 | 104 | 96 |
| N325A | | | | | | | | | |
| Y192A | 111 | 134 | 122 | 108 | F293A | 52 | 87 | 95 | 102 |
| Q193A | 126 | 81 | 117 | 109 | S294A | 57 | 99 | 71 | 155 |
| V194A | 127 | 160 | 109 | 100 | P295A | 65 | 132 | 82 | 115 |
| R195A | 88 | 197 | 121 | 115 | R296A | 52 | 108 | 138 | 114 |
| N196A | 77 | 45 | 52 | 75 | H298A | 46 | 164 | 62 | 94 |
| S198A | 90 | 61 | 78 | 52 | Q302A | 8 | 215 | 6 | 5 |
| Y201A | 81 | 5 | 7 | 7 | N305A | 46 | 123 | 42 | 80 |
| T204A | 82 | 102 | 24 | 23 | S307A | 69 | 157 | 58 | 84 |
| N205A | 113 | 96 | 3 | 6 | Y309A | 90 | 78 | 32 | 31 |
| D206A | 96 | 81 | 17 | 13 | G311A | 90 | 89 | 87 | 107 |
| N209A | 76 | 119 | 117 | 113 | T314A | 93 | 99 | 83 | 93 |
| S211A | 94 | 106 | 93 | 100 | G315A | 122 | 91 | 87 | 125 |
| I212A | 101 | 125 | 51 | 82 | H316A | 91 | 95 | 70 | 81 |
| L221A | 100 | 104 | 100 | 103 | R317A | 112 | 95 | 98 | 108 |
| H222A | 79 | 132 | 44 | 74 | M318A | 97 | 97 | 92 | 80 |
| P224A | 118 | 99 | 104 | 104 | A319G | 119 | 101 | 113 | 111 |
| G225A | 90 | 106 | 79 | 85 | W320A | 140 | 105 | 121 | 112 |
| V227A | 107 | 150 | 98 | 106 | D321A | 102 | 91 | 92 | 107 |
| P228A | 59 | 171 | 38 | 55 | M322A | 65 | 115 | 143 | 98 |
| N234A | 83 | 105 | 114 | 99 | M323A | 78 | 69 | 99 | 85 |
| S236A | 71 | 88 | 81 | 87 | M324A | 74 | 80 | 89 | 92 |
| W239A | 86 | 103 | 67 | 86 | N325A | 109 | 83 | 150 | 96 |
| P244A | 78 | 85 | 95 | 95 | W326A | 91 | 72 | 125 | 96 |
| V246A | 91 | 96 | 97 | 99 | S327A | 89 | 85 | 69 | 121 |
| T255A | 100 | 106 | 96 | 95 | P328A | 97 | 123 | 127 | 106 |
| L258A | 96 | 99 | 89 | 97 | T329A | 123 | 89 | 114 | 96 |
| R259A | 93 | 97 | 102 | 100 | R339A | 233 | 87 | 119 | 120 |
| H261A | 100 | 96 | 106 | 103 | P341A | 129 | 101 | 105 | 104 |
| D263A | 99 | 96 | 85 | 91 | D346A | 85 | 87 | 83 | 73 |
| V266A | 96 | 96 | 92 | 95 | G350A | 77 | 79 | 68 | 57 |
| A269G | 38 | 47 | 55 | 74 | H352A | 101 | 85 | 60 | 48 |
| S273A | 41 | 38 | 70 | 79 | W353A | 80 | 75 | 70 | 75 |
| A274G | 81 | 53 | 71 | 85 | G354A | 111 | 105 | 90 | 91 |

TABLE 29
Binding of Na4 IgG and V1 IgG to E1E2 complexes containing E2 mutants

| | Binding relative to wt (%) | | | | | Binding relative to wt (%) | | | |
|---|---|---|---|---|---|---|---|---|---|
| | Mab | A4 | N4 | V1 | | Mab | A4 | N4 | V1 |
| | AR3A | mouse | IgG | IgG | | AR3A | mouse | IgG | IgG |
| T425A | 19 | 104 | 100 | 93 | Y618A | 20 | 157 | 33 | 51 |
| L427A | 18 | 102 | 125 | 112 | P619A | 29 | 108 | 41 | 61 |
| N428A | 22 | 127 | 98 | 83 | T621A | 21 | 114 | 34 | 36 |
| T435A | 80 | 117 | 122 | 89 | xN623A | 30 | 116 | 54 | 60 |
| G436A | 30 | 96 | 107 | 97 | Y624A | 32 | 121 | 59 | 59 |
| A439G | 12 | 119 | 12 | 12 | R630A | 89 | 106 | 115 | 20 |
| L441A | 9 | 111 | 18 | 11 | G634A | 89 | 112 | 117 | 101 |
| F442A | 7 | 90 | 22 | 14 | G635A | 76 | 109 | 80 | 86 |
| Y443A | 7 | 28 | 5 | 3 | E637A | 55 | 122 | 67 | 101 |
| F447A | 27 | 98 | 28 | 19 | H638A | 23 | 104 | 12 | 55 |
| xN448A | 29 | 97 | 48 | 19 | R639A | 64 | 162 | 114 | 9 |
| R614A | 12 | 133 | 16 | 12 | A642G | 20 | 137 | 65 | 74 |
| H617A | 11 | 140 | 21 | 21 | A643G | 17 | 131 | 34 | 47 |

### Example 5

### Sensitivity of HCVpp Containing Modified E1 with the F293A, P295A, T314A or H316A Mutation to Antibodies

[0466] As demonstrated above, HCVpp containing F293A or P295A exhibited an approximate 5-fold increase in infectivity compared to HCVpp 1177.20, and HCVpp containing T314A or H316A exhibited an approximate 3-fold increase in infectivity compared to HCVpp 1177.20. Due to their increased infectivity compared to wild-type HCVpp, these virions, and others containing these E1 mutants, could be of particular use in screening anti-HCV antibodies and other anti-virals, as very few HCV isolates (including HCVcc and HCVpp) can produce infectious virions for in vitro assays. A key issue is whether the mutations also increase virus sensitivity to antibody neutralization, thus rendering them insuitable for the in vitro assays. Therefore, to determine whether the E1 mutations result in increased sensitivity to antibody neutralization, a neutralization assay was performed with C1 IgG (recognizes AR3), G IgG (recognizes AR2), N4 IgG (recognizes conformational E1/E2 epitope) and a negative control antibody, Den3 IgG (recognizes Dengue virus NS1 protein). The assay was performed essentially as described in Example 1. None of the HCVpp tested were neutralized by the negative control antibody, Den3 IgG (FIG. 8). HCVpp containing E1 with the P295A mutation exhibited similar sensitivity to the C1 IgG and N4 IgG as wildtype H77.20, with perhaps slightly increased sensitivity to G IgG. HCV containing E1 with the T314A or H316A mutation exhibited increased resistance to antibody neutralization compared to wildtype HCV. HCV containing E1 with the F293A mutation exhibited the greatest resistance to neutralization by all three anti-HCV antibodies compared to wild-type H77.20.

### Example 6

### Isolation of Further Monoclonal Antibodies

[0467] Additional rounds of epitope-masking/panning of the phage-display Fab library, essentially as described in Example 1, were performed and fourteen new monoclonal antibodies were isolated. The E1E2 complex from isolate H77 produced by transient transfection of 293T cells was used as a panning antigen. The antigens were presented in two different formats for two additional panning experiments. The formats were (1) E1E2 complex captured by Galanthus nivalis lectin, and (2) E1E2 complex captured by MAb AR3A then blocked with a cocktail of MAbs: AR1B, N4 and V1. The unmasked E1E2 complex was used in library panning for 4 rounds. The heavy chain of approximately 96 clones from rounds 3 and 4 of panning were analyzed by DNA sequencing and 11 new clones with specific reactivity to unmasked E1E2 were obtained. The antibody-masked E1E2 complex was used in library panning for a total of 6 rounds because no specific binder was obtained in rounds 3 and 4. The heavy chain of approximately 48 clones from round 6 were analyzed by DNA sequencing and 3 more clones with specific reactivity to unmasked E1E2 were obtained. DNA sequence analysis revealed 14 unique antibody sequences compared to those antibodies identified in the antibody panels described in Examples 1 and 3. The Fabs were sorted into groups based on heavy chain sequence. Four Fabs, labeled B4, B5, B6a, B6b, B6c and B7, were found to be heavy chain somatic variants of the previously identified Fabs B1 and B2. Three Fabs, labeled E2, E3 and E4, were found to be heavy chain somatic variants of the previously identified Fab E. One Fab, labeled J5, was found to be a heavy chain somatic variant of the previously identified Fabs J1, J2, J3 and J4. Three Fabs, L5, L6 and L7 were found to be heavy chain somatic variants of the previously identified Fabs L1, L2, L3 and L4. One Fab, labeled S2, was found to be a heavy chain somatic variant of the previously identified Fab S. Two Fabs, labeled U2 and U3, were found to be heavy chain somatic variants of the previously identified Fab U. The heavy and light chain amino acid sequences of these fourteen antibodies are shown in Tables 30 and 31, respectively. Fabs B7, E4 and L7 were identified by using the antibody-masked E1E2 panning strategy, while the remaining Fabs were identified using the unmasked E1E2 panning strategy. Also shown in the Tables are previously isolated Fabs B1, E1, J1, L1 S1 and U1, for comparison.

TABLE 30A
Heavy chain Framework 1 and CDR1 sequences

| | Framework 1 | | CDR1 | |
|---|---|---|---|---|
| Fab | Sequence | SEQ ID NO | Sequence | SEQ ID NO |

| | | | | |
|---|---|---|---|---|
| B1 | LEQSGAEVKKPGSSVKVSCRASGSPFS | 310 | SYTIT | 79 |
| B4 | EVQLLEQSGAEVKKPGSSVKVSCRASGSPFS | 1134 | SYTIT | 79 |
| B5 | EVQLLE SGAEVKKPGSSVKVSCRASGSPYS | 1135 | SYTIT | 79 |
| B6 | EVQLLEQSGAEVKKPGSSVKVSCRASGSPYS | 1136 | SYTIT | 79 |
| B7 | EVQLLEQSGAEVKKPGSSVKVSCRASGSPYS | 1136 | SYTIT | 79 |
| E | LEQSGAELKKPGSSVKVSCKPSDGTFR | 323 | AYTLS | 92 |
| E2 | EVGLLEQSGAELKKPGSSVKVSCKPSDGTFR | 1137 | AYTLS | 92 |
| E3 | EVGLLEQSGAELKKPGSSVKVSCKPSDGTFR | 1137 | AYTLS | 92 |
| E4 | EVGLLEQSGAELKKPGSSVKVSCKPSDGTFR | 1137 | AYTLS | 92 |
| J1 | LEQSGPEVKKPGSSVKVSCKGSGDRFN | 330 | DPVT | 99 |
| J5 | EVQLLEQSGAEVKKPGSSVTVSCKASGGTVS | 1138 | SYPIT | 1090 |
| L1 | LEQSGAEVKKPGSSVKVSCKASGDTFR | 335 | SYVIT | 104 |
| L5 | EVQLLEQSGTEVKKPGSSVKVSCKVPGDTFR | 1139 | SYVIT | 104 |
| L6 | EVQLLEQSGTEVKKPGSSVKVSCKVPGDTFR | 1139 | SYVIT | 104 |
| L7 | EVQLLEQSGAEVKKPGSSVKVTCKVPGDTFR | 1140 | SYVIT | 104 |
| S1 | EVQLLEQSGAEVKKPGTSVKVSCTASGYIFT | 849 | SFGIS | 738 |
| S2 | EVQLLEQSGAEVKKPGASVKVSCTASGYIFT | 1141 | SFGIS | 738 |
| U1 | EVQLLEQSGPEVKRPGTSVKMSCKISGGASI | 851 | TQAMS | 740 |
| U2 | EVQLLEQSGAEVKRPGSSVKLSCKNSGGTFI | 1142 | TQAMT | 1091 |
| U3 | EVQLLEQSGAEVKRPGSSVKISCKNSGGTFI | 1143 | TQAMS | 740 |

TABLE 30B
Heavy chain Framework 2 and CDR2 sequences

| | Framework 2 | | CDR2 | |
|---|---|---|---|---|
| | | SEQ ID | | SEQ ID |
| Fab | Sequence | NO | Sequence | NO |
| B1 | WVRQAPGQGLEWMG | 341 | GIILMTGKANYAQKFQG | 110 |
| B4 | WVRQAPGQGLEWMG | 341 | GIILMTGKANYAQKFQG | 110 |
| B5 | WVRQAPGQGLEWMG | 341 | GIILMTGKANYAQKFQG | 110 |
| B6 | WVRQAPGQGLEWMG | 341 | GIILMTGKANYAQKFQG | 110 |
| B7 | WVRQAPGQGLEWMG | 341 | GIILMTGKANYAQKFQG | 110 |
| E | WVRQAPGQTLEWMG | 354 | RIMPTVGITNYAQKFQG | 123 |
| E2 | WVRQAPGQTLEWLG | 1144 | RIMPTVGITNYAQKFQG | 123 |
| E3 | WVRQAPGQALEWMG | 1145 | RIMPTVGITNYARKFQG | 1092 |
| E4 | WVRQAPGQTLEWMG | 354 | RIMPTVGITNYAQKFQG | 123 |
| J1 | WVRQAPGQGLEWIG | 361 | GIIPAFGATKYAQKFQG | 130 |
| J5 | WVRQAPGQGLEWMG | 341 | GTIPVFGAPKYAPKFQG | 1093 |
| L1 | WARQAPGQGLEWMG | 366 | AIIPFFGTTNLAQKFQG | 135 |
| L5 | WVRQAPGQGLEWLG | 1146 | GILPFFGTTNLAQKFQG | 1094 |
| L6 | WVRQSPGQGLEWLG | 1147 | GILPFFGTTNLAQKFQG | 1094 |
| L7 | WVRQAPGQGLEWLG | 1146 | GILPFFGTTNLAQKFQG | 1094 |
| S1 | WVRQAPGQGLEWMG | 867 | RIDTYNGKTNYAQKLQG | 756 |
| S2 | WVRQAPGQGLEWMG | 341 | RIDTYNGKTNYAQKLQG | 756 |
| U1 | WVRQAPGQGLEWMG | 869 | GITPIFGTVNYAQKILG | 758 |
| U2 | WVRQAPGQGLEWMG | 341 | GIIPVFGTVNYAQNILD | 1095 |
| U3 | WVRQAPGQGLEWMG | 341 | GIIPIFGTVNYAQKILG | 1096 |

TABLE 30C
Heavy chain Framework 3 and CDR3 sequences

| | |
|---|---|
| Framework 3 | CDR3 |

| | | | | |
|---|---|---|---|---|
| | | SEQ | | SEQ |
| | | ID | | ID |
| Fab | Sequence | NO | Sequence | NO |

| | | | | |
|---|---|---|---|---|
| B1 | RVTITADRSTTTAYMEMSSLTSDDTAIYYCAR | 372 | DPYVYAGDDVWSLSR | 141 |
| B4 | RVTITADRSTTTAYMEMSSPTSDDTAIYYCAR | 1148 | DPYVYAGDDVWSLSR | 141 |
| B5 | RVTITADRATATAYMEMSSLTSDDTAIYYCAR | 1149 | DPYVYAGDDVWSLSR | 141 |
| B6 | RVTITADRATATAYMEMSSLTSDDTAIYYCAR | 1149 | DPYVYAGDDVWSLSR | 141 |
| B7 | RVTITADRATATAYMEMSSLTSDDTAIYYCAR | 1149 | DPYVYAGDDVWSLSR | 141 |
| E | RVTISADMSTATAYMELSSLRSDDTAIYYCAK | 385 | GPYVGLGEGFSE | 154 |
| E2 | RVTISADMSTATAYMQLSSLRPDDTAIYYCAK | 1150 | GPYVGLGEGFSE | 154 |
| E3 | RVTISADMSTATAYMELSSLRSDDTAIYYCAK | 385 | GPYVGLGEGFSE | 154 |
| E4 | RVTISADMSTATAYMELSSLRSDDTAIYYCGK | 1151 | GPYVGLGEGFSE | 154 |
| J1 | RVVISADASTDTAYMELSSLRSEDTAVYYCAK | 392 | VGVRGIILVGGLAMNWLDP | 161 |
| J5 | RVTITADESTSTAYMELRSLRSDDTAMYYCAI | 1152 | VGMRGITLVGGLAMNWLDP | 1097 |
| L1 | RVTITADESTQTVYMDLSSLRSDDTAVYYCAK | 397 | AGDLSVGGVLAGGVPHLRHFDP | 166 |
| L5 | RVTLTADESTTTAYMELSSLRAEDTAVYYCAK | 1153 | AGDLAFGGVIAGGVPHLSHFDP | 1098 |
| L6 | RVTLTADESTTTAYMELSSLRSEDTAVYYCAK | 1154 | AGDLAFGGVIAGGVPHLSHFDP | 1098 |
| L7 | RVTLTADESTTTAYMELSSLRAEDTAVYYCAK | 1153 | AGDLAFGGVIAGGVPHLSHFDP | 1098 |
| S1 | RVTMTTDTYTSTAYMELRSLTSDDTAVYYCAR | 885 | DDCRSSTCYLAQHNWQAYYH DS | 774 |
| S2 | RVTMTTDTYTSTAYMELRSLTSDDTAVYYCAR | 885 | DDCRSSTCYLAQHNWQAYYH DS | 774 |
| U1 | RVTITADED TVSLELSSLKSEDTAVYYCAR | 887 | EVNLKTWNLAHPNVF DV | 776 |
| U2 | RATATADED TFSLELRGLRLEDTAVYYCAR | 1155 | EVNLKTWNLARPDVF DI | 1099 |
| U3 | RVTITADED TVSMELSSLGFEDTAVYYCAR | 1156 | EVNLKSWNLAHPDVF DI | 1100 |

TABLE 30D
Heavy chain Framework 4

Framework 4

| | | SEQ |
|---|---|---|
| | | ID |
| Fab | Sequence | NO |
| B1 | WGQGTLVIVSSAS | 403 |
| B4 | WGQGTLVIVSP | 1157 |
| B5 | WGQGTPVIVSS | 1158 |
| B6 | WGQGTPVTVSS | 1159 |
| B7 | WGQGTPVIVSS | 1158 |
| E | WGQGTLVTVSSAS | 416 |
| E2 | WGQGTLVTVSS | 1160 |
| E3 | WGQGTLVTVSS | 1160 |
| E4 | WGQGTLVTVSS | 1160 |
| J1 | WGQGTLVTVSAAS | 423 |
| J5 | WGQGTLVIVSS | 1161 |
| L1 | WGQGTLVTVSSAS | 428 |
| L5 | WGQGTLVTVSS | 1160 |
| L6 | WGQGTLVTVSA | 1162 |
| L7 | WGQGTLVTVSS | 1160 |
| S1 | WGQGTLVTVSS | 903 |
| S2 | WGQGTLVTVSS | 1160 |
| U1 | WGQGTMLTVSS | 905 |
| U2 | WGPGTLVTVSS | 1163 |
| U3 | WGQGTLVTVSS | 1164 |

TABLE 31A
Light chain Framework 1 and CDR1 sequences

| | Framework 1 | | | |
|---|---|---|---|---|
| | | SEQ ID | CDR1 | |
| Fab | Sequence | NO | Sequence | SEQ ID NO |

| | | | | |
|---|---|---|---|---|
| B1 | ELTLTQSPGTLSLSPGERATLSC | 434 | RASQS VSNSYLA | 172 |
| B4 | ELTLTQSPGTLSLSPGKRATLSC | 1165 | RASQS VSGSYLA | 1101 |
| B5 | ELTQSPLSLPVIIGQPASISC | 1166 | SSSESLVDSDGNTYLH | 1102 |
| B6a | LTQSPGTLSLSPGERATLSC | 1167 | RASQS VASNYVA | 1103 |
| B6b | ELTQSPGTLSLSPGERATLSC | 1171 | RASQS VSRGNLA | 1107 |
| B6c | ELTQSPGTLSLSPGERATLSC | 1171 | RASQS VSSSYLA | 196 |
| B7 | EL TQSPLSLPVTLGQPASISC | 1168 | RSSQSLVYSDGNTYLN | 1104 |
| E | ELVLTQSPLSLPVTLGQPASISC | 449 | RSTQSLVYSDGNTYLN | 187 |
| E2 | ELTQSPLSLPVTLGQPASISC | 1169 | RSSQSLVYSDGNTYLI | 1105 |
| E3 | ELVLTQSPLSLPVTLGQPASISC | 1170 | RSTQSLVYSDGNTYLN | 1106 |
| J1 | ELVLTQSPGTLSLSPGERATLSC | 485 | RASQS VSSSYLA | 196 |
| J5 | EL TQSPGTLSLSPGERATLSC | 464 | RASQS VSSNYLA | 1108 |
| L1 | EL TQSPGTLSLSPGERATLSC | 464 | RASQS ITSRYLA | 202 |
| L5 | EL TQSPGTLSLSPGERATLSC | 464 | RASQS VRSNYLA | 1109 |
| L6 | EL TQSPGTLSLSPGERATLSC | 464 | RASQS VSSSYLA | 196 |
| L7 | EL TQSPGTLSLSPGERATLSC | 464 | RASQS VPSSYLG | 1110 |
| S1 | ELVLTQSPGTLSLSPGERATLSC | 922 | RASQS VSSSYLA | 196 |
| S2 | EL TQSPATLSLSPGERATLSC | 1172 | RASQS VSSRFLA | 1111 |
| U1 | EL TQSPSSLSASVGDRVTITC | 924 | RASQS ISSFLN | 795 |
| U2 | EL TQSPSSLSASIGDRVTIPC | 1173 | RASQS ILNHLN | 1112 |
| U3 | EL TQSPSSLSASVGDRVTITC | 924 | RASQS IRSYLN | 1113 |

TABLE 31B
Light chain Framework 2 and CDR2 sequences

| | Framework 2 | | | |
|---|---|---|---|---|
| | | SEQ ID | CDR2 | |
| Fab | Sequence | NO | Sequence | SEQ ID NO |
| B1 | WYQQKPGQAPRLLIY | 469 | GASSRAT | 207 |
| B4 | WYQQKPGQAPRLLIY | 469 | GASNRAT | 1114 |
| B5 | WFQQRPGQSPRRLIY | 1174 | KVSNRDA | 1115 |
| B6a | WYQQKPGQAPRLLIY | 1175 | GTSYRAT | 1116 |
| B6b | WYQQKRGQPPRLLIY | 1179 | GASYRAT | 1119 |
| B6c | WYQQKPGQAPRLLIY | 1175 | GASSRAT | 207 |
| B7 | WFQQRPGQSPRRLIY | 1176 | KVSNRDS | 222 |
| E | WFHQRAGQPPRRLIY | 484 | KVSNRDS | 222 |
| E2 | WFQQRPGQSPRRLIY | 1177 | NVSNRDS | 1117 |
| E3 | WFHQRPGQPPRRLIY | 1178 | ELVLTQS | 1118 |
| J1 | WYQQKPGQAPRLLIY | 493 | GASSRAT | 231 |
| J5 | WYQQKPGQAPRLLIY | 469 | GASSRAT | 231 |
| L1 | WYQQKPGQAPRLLIY | 499 | GASSRAT | 237 |
| L5 | WYQQKPGQAPRLLIY | 469 | GASSRAT | 207 |
| L6 | WYQQKPGQAPRLLIY | 469 | GASSRAT | 207 |
| L7 | WYQQKPGQAPRLLIY | 469 | GASSRAT | 207 |
| S1 | WYQQKPGQAPRLLIY | 941 | GASSRAT | 812 |
| S2 | WYQQKPGQAPRLLIY | 469 | GASSRAT | 207 |
| U1 | WYQQKPGKAPKLLIY | 943 | AASSLQS | 814 |
| U2 | WYQQKPGQPPKLLIF | 1180 | AASNLQS | 1120 |
| U3 | WYQQKPGKAPNLLIY | 1181 | SASNLQS | 1121 |

TABLE 31C
Light chain Framework 3 and CDR3 sequences

| | |
|---|---|
| Framework 3 | CDR3 |

| | | | | |
|---|---|---|---|---|
| | | SEQ ID | | SEQ ID |
| Fab | Sequence | NO | Sequence | NO |

| | | | | |
|---|---|---|---|---|
| B1 | GIPDRFSGSGSGTDFTLTISRLEPEDFAVYYC | 504 | QQYGSSPQT | 242 |
| B4 | GIPHRFSGSGSGTDFTLTISRLEPEDFAVYYC | 1182 | QQYGSSPPT | 1122 |
| B5 | GVPDRFSGSGSGTDFTLKISRVEAEDVAVYYC | 1183 | MQATHWPPIT | 1123 |
| B6a | GIPGRFSGSGSGTDFTLTISGLEPEDFAVYYC | 1184 | QQYGSSPQT | 1124 |
| B6b | GIPDRFSGSGSGTDFTLTITKLEPEDFAVYYC | 1188 | QQYGHSLA | 1128 |
| B6c | GIPDRFSGSGSGTDFTLTISRLEPEDFAVYYC | 504 | QQYGSSPQT | 1124 |
| B7 | GVPDRFSGSGSGTDFTLKISRVEAEDVGVYYC | 1185 | MQGTHWPPT | 1125 |
| E | GVPERFSGSGSGTDFTLKISRVEAEDVGIYYC | 519 | MQGAHWPPT | 257 |
| E2 | GVPDRFSGSGSGTDFTLKISRVEAEDLGVYYC | 1186 | MQGAHWPPT | 1126 |
| E3 | GVPERFSGSGSGTDFALKISRVEADDVGIYYC | 1187 | MQGAHWPPT | 1127 |
| J1 | GIPDRFSGSGSGTDFALTITRLEPEDFAVYYC | 528 | QQYGSSPQT | 266 |
| J5 | GIPDRFSGSGSGTDFTLSISRLEPEDFAVYYC | 1189 | QQYGSSPLT | 1129 |
| L1 | GIPDRFSGSGSGTDFTLTISRLEPEDFAVYYC | 534 | QQYGDSVG | 272 |
| L5 | GIPDRFSGSGSGTDFTLTISRLEPEDFAMYYC | 1190 | QQYGSSMCS | 1130 |
| L6 | GIPDRFSGSGSGTDFTLTISRLEPEDFAVYYC | 534 | QQYGSSVT | 1131 |
| L7 | GIPERFSGSGSGTDFTLTISRLEPEDFAVYYC | 1191 | QQYGSSLS | 1132 |
| S1 | GIPDRFSGSGSGTDFTLTISRLEPEDFAVYYC | 960 | QQYGSSPQT | 831 |
| S2 | GIPDRFSGSGSGTDFTLTISRLEPEDFAVYYC | 534 | QQYGSSPQT | 831 |
| U1 | GVPPRFSGSGSGTDFTLTISSLQPEDFATYYC | 962 | QQSYSTPRT | 833 |
| U2 | GVPSRFSGSGSGTDFTLTISSLQTEDFATYYC | 1192 | QQSYSTPRT | 833 |
| U3 | GVPSRFRGSGSGTDFTLTISSLQPEDFATYYC | 1193 | QQSYRTPRT | 1133 |

TABLE 31D
Light chain Framework 4

Framework 4

| | | SEQ |
|---|---|---|
| | | ID |
| Fab | Sequence | NO |
| B1 | FGQGTKVEIKRTVAAPSVFIFPPSDEQLKSGTASVV | 539 |
| B4 | FGQGTRVDIKRT | 1194 |
| B5 | FGPGTRLEVKRT | 1195 |
| B6a | FGQGTKVEIKRT | 1196 |
| B6b | FGQGTKVEIKGT | 1200 |
| B6c | FGQGTKVEIKRT | 1196 |
| B7 | FGQGTKVDIKRT | 1197 |
| E | FGGGTKVEINRTVAAPSVFIFPPSDEQLKSGTA | 554 |
| E2 | FGQGTRLEIKGT | 1198 |
| E3 | FGGGTKVEISRT | 1199 |
| J1 | FGQGTKVEIKRTVAAPSVFIFPPSDEQLKSGTASVV | 563 |
| J5 | FGGGTKVEIKRT | 1201 |
| L1 | FGPGTKVEIKRTVAAPSVFIFPPSDEQLKSGTASVV | 569 |
| L5 | FGQGTKVEIKRT | 979 |
| L6 | FGPGTKVDIKRT | 1202 |
| L7 | FGQGTKVDLKRT | 1203 |
| S1 | FGQGTKVEIKRT | 979 |
| S2 | FGQGTKVEIKRT | 979 |
| U1 | FGQGTKLEIKRT | 981 |
| U2 | FGQGTKVEVKRT | 1204 |
| U3 | FGQGTKVESKRT | 1205 |

[0468] All patents and publications referenced or mentioned herein are indicative of the levels of skill of those skilled in the art to which the invention pertains, and each such referenced patent or publication is hereby incorporated by reference to the same extent as if it had been incorporated by reference in its entirety individually or set forth herein in its entirety. Applicants reserve the right to physically incorporate into this specification any and all materials and information from any such cited patents or publications.

[0469] The specific methods and compositions described herein are representative of preferred embodiments and are exemplary and not intended as limitations on the scope of the invention. Other objects, aspects, and embodiments will occur to those skilled in the art upon consideration of this specification, and are encompassed within the spirit of the invention as defined by the scope of the statements. It will be readily apparent to one skilled in the art that varying substitutions and modifications may be made to the invention disclosed herein without departing from the scope and spirit of the invention. The invention illustratively described herein suitably may be practiced in the absence of any element or elements, or limitation or limitations, which is not specifically disclosed herein as essential. The methods and processes illustratively described herein suitably may be practiced in differing orders of steps, and that they are not necessarily restricted to the orders of steps indicated herein or in the statements. As used herein and in the appended statements, the singular forms “a,” “an,” and “the” include plural reference unless the context clearly dictates otherwise. Thus, for example, a reference to “an antibody” includes a plurality (for example, a solution of antibodies or a series of antibody preparations) of such antibodies, and so forth. Under no circumstances may the patent be interpreted to be limited to the specific examples or embodiments or methods specifically disclosed herein. Under no circumstances may the patent be interpreted to be limited by any statement made by any Examiner or any other official or employee of the Patent and Trademark Office unless such statement is specifically and without qualification or reservation expressly adopted in a responsive writing by Applicants.

[0470] The terms and expressions that have been employed are used as terms of description and not of limitation, and there is no intent in the use of such terms and expressions to exclude any equivalent of the features shown and described or portions thereof, but it is recognized that various modifications are possible within the scope of the invention as statemented. Thus, it will be understood that although the present invention has been specifically disclosed by preferred embodiments and optional features, modification and variation of the concepts herein disclosed may be resorted to by those skilled in the art, and that such modifications and variations are considered to be within the scope of this invention as defined by the appended statements.

[0471] The invention has been described broadly and generically herein. Each of the narrower species and subgeneric groupings falling within the generic disclosure also form part of the invention. This includes the generic description of the invention with a proviso or negative limitation removing any subject matter from the genus, regardless of whether or not the excised material is specifically recited herein.

[0472] The following statements of the invention are intended to characterize possible elements of the invention according to the foregoing description given in the specification. Because this application is a provisional application, these statements may become changed upon preparation and filing of a nonprovisional application. Such changes are not intended to affect the scope of equivalents according to the statements issuing from the nonprovisional application, if such changes occur. According to 35 U.S.C. §111(b), statements are not required for a provisional application. Consequently, the statements of the invention cannot be interpreted to be statements pursuant to 35 U.S.C. §112.

[0473] Since modifications will be apparent to those of skill in this art, it is intended that this invention be limited only by the scope of the appended claims.

The application's sequence listing, which the Patent Office published only in electronic form, follows.

SEQUENCE LISTING (1365 sequences)

SEQ ID NO: 1 - protein, 141 aa, Artificial Sequence
  A heavy chain
LEQSGAEVKKPGSSVKVSCKASGGTFSSFVINWVRQAPGQGLEWVGGIFQAPGPEREWLRDINPISGTINYAQRFQGRVTMTADESMTTVYMELSSLRSEDTAMYYCARENKFRYCRGGSCYSGAFDMWGQGTMVTVSSAS

SEQ ID NO: 2 - protein, 123 aa, Artificial Sequence
  B1 heavy chain
LEQSGAEVKKPGSSVKVSCRASGSPFSSYTITWVRQAPGQGLEWMGGIILMTGKANYAQKFQGRVTITADRSTTTAYMEMSSLTSDDTAIYYCARDPYVYAGDDVWSLSRWGQGTLVIVSSAS

SEQ ID NO: 3 - protein, 123 aa, Artificial Sequence
  B2 heavy chain
LEQSGAEVKKPGSSVKVSCRASGSPYSSYTITWVRQAPGQGLEWMGGIILMTGKANYAQKFQGRVTITADRATATAYMEMSSLTSDDTAIYYCARDPYVYAGDDVRSLSRWGQGTPVIVSSAS

SEQ ID NO: 4 - protein, 123 aa, Artificial Sequence
  B3 heavy chain
LEQSGAEVKKPGSSVKVSCRASGSPYSSYTITWVRQAPGQGLEWMGGIILMTGKANYAQKFQGRVTITADRATATAYMEMSSLTSDDTAIYYCARDPYVYAGDDVWSLSRWGQGTPVIVSSAS

SEQ ID NO: 5 - protein, 126 aa, Artificial Sequence
  C1 and C1* heavy chain
LEQSGAEVKTPGSSVRVSCRPPGGNFNSYSINWVRQAPGHGLEWVGTFIPMFGTSKYAQKFQGRVTITADGSSGTAYMDLNSLRSDDTAFYYCVRPETPRYCSGGFCYGEFDNWGQGTLVTVSSAS

SEQ ID NO: 6 - protein, 126 aa, Artificial Sequence
  C2 and C2* heavy chain
LEQSGAEVKKPGSSVRVSCRAPGGTFNSYSVNWVRQAPGHGLEWVGTLIPMFGTSSYAQKFQGRVTITADGSSGTAYMELNSLRSDDTAVYYCVRPETPRYCRGGFCYGEFDNWGQGTLVTVSSAS

SEQ ID NO: 7 - protein, 126 aa, Artificial Sequence
  C3 Fab heavy chain
LEQSGAEVKEPGSSVRVSCRAPGGTFNSYSINWVRQAPGHGLEWVGTLIPMFGTSNYAQKFQGRVTITADGSSGTAYMELNSLRSDDTAVYYCVRPETPRYCSGGVCYGEFDNWGQGTLVTVSSAS

SEQ ID NO: 8 - protein, 125 aa, Artificial Sequence
  C4 heavy chain
LESGAEVKKPGSSVRVSCRPPGGTFNSYSINWVRQAPGHGLEWVGTIIPMFGTSKYAQKLQGRVTITADGSSGTAYMELNSLRSDDTAVYYCVRPETPRYCSGGFCYGEFDNWGQGTLVTVSSAS

SEQ ID NO: 9 - protein, 126 aa, Artificial Sequence
  C5 heavy chain
LEQSGAEVKKPGSSVRVSCRAPGGTLNSYSINWVRQAPGHGLEWVGTLIPMFGTSNYAQKFQGRVTITADGSSGTAYMELNSLRSDDTAVYYCVRPETPRYCSGGFCYGEFDNWGQGTLVTVSSAS

SEQ ID NO: 10 - protein, 126 aa, Artificial Sequence
  C6 heavy chain
LEQSGAEVKKPGSSVRVSCRPPGGTFNSYSINWVRQAPGHGLEWVGTIIPMFGTSKYAQKLQGRVTITADGSSGTAYMELNSLRSDDTAVYYCVRPETPRYCSGGFCYGEFDNWGQGTLVTVSSAS

SEQ ID NO: 11 - protein, 122 aa, Artificial Sequence
  D1 heavy chain
LESGGGLVQPGGSLRLSCEASGYYFSSFAMSWVRQTPGKGLEWVSSIAGGTLGRTSYRDSVKGRFTISRDNSKNTVFLHMNNLRPEDTAVYYCAKDPLLFAGGPNWFDHWGQGTLVTVSSAS

SEQ ID NO: 12 - protein, 123 aa, Artificial Sequence
  D2 heavy chain
LEQSGGGLVQPGGSLRLSCEASGYYFSSFAMSWVRQTPGKGLEWVSSIAGGTLGRTSYRDSVKGRFTISRDNSKNTVFLHMNNLRPEDTAVYYCAKDPLLFAGGPNWFDHWGQGTLVTVSSAS

SEQ ID NO: 13 - protein, 122 aa, Artificial Sequence
  D3 heavy chain
LESGGGLVQPGGSLRLSCEASGYYFSSFAMSWVRQTPGKGLEWVSSIAGGTLGRTSYRDSVKGRFTISRDNSKNTMFLHMNNLRPEDTAVYYCAKDPLLFAGGPNWFDHWGQGTLVTVSSAS

SEQ ID NO: 14 - protein, 122 aa, Artificial Sequence
  D4 heavy chain
LESGGGLVQPGGSLRLSCEASGYYFSSFAMSWVRQTPGKGLEWVSSIAGGTLGRTSYRDSVKGRFTISRDNSKNTVFLHMSNLRPEDTAVYYCAKDPLLFAGGPNWFDHWGQGTLVTVSSAS

SEQ ID NO: 15 - protein, 120 aa, Artificial Sequence
  E heavy chain
LEQSGAELKKPGSSVKVSCKPSDGTFRAYTLSWVRQAPGQTLEWMGRIMPTVGITNYAQKFQGRVTISADMSTATAYMELSSLRSDDTAIYYCAKGPYVGLGEGFSEWGQGTLVTVSSAS

SEQ ID NO: 16 - protein, 113 aa, Artificial Sequence
  F heavy chain
LEQSGNEVKKPGASVKVSCRAYGYNFGSERLSWVRQAPGQGLEWMGWISAYNGGINYSQKFQGRFTMTTDTSTRTGYMELRNLRSDDTAVYYCARGGGTEWGQGTLVIVSSDE

SEQ ID NO: 17 - protein, 126 aa, Artificial Sequence
  G heavy chain
LEQSGAEMKKPGASLKVSCKTSGYTFDDYGVTWVRQAPGQGLEWMGWISAYSGNTFYARKFQGRVTMTTDPSTRTAYMELRSLRSDDTAVYFCARDRGLAINGVVFPYFGLDVWGQGTTVTVSSAS

SEQ ID NO: 18 - protein, 126 aa, Artificial Sequence
  H1, H1* and H1**  heavy chain
LEQSGAEVKKPGSSVKVSCEASGGTFDNYSLNWVRQAPGQGLEWIGGVVPLFGTTKYAQKFQGRVTISDDKSTGTGHMELRSLRSEDTAVYYCVRSVTPRHCGGGFCYGEFDYWGQGTLVTVSSAS

SEQ ID NO: 19 - protein, 126 aa, Artificial Sequence
  H2  heavy chain
LEQSGAEVKKPGSSVKVSCETSGGTFDNYALNWVRQAPGQGLEWIGGVVPLFGTTKYAQKFQGRVTISDDKSTGTGHMELRSLRSEDTAVYYCVRSVTPRHCGGGFCYGEFDYWGQGTLVTVSSAS

SEQ ID NO: 20 - protein, 126 aa, Artificial Sequence
  H3  heavy chain
LEQSGAEVKKPGSSVKVSCETSGGTLDNYALNWVRQAPGQGLEWIGGVVPLFGTTRNAQKFQGRVTISDDKSTGTGHMELRSLRSEDTAVYYCVRSVTPRYCGGGFCYGEFDYWGQGTLVTVSSAS

SEQ ID NO: 21 - protein, 127 aa, Artificial Sequence
  I  heavy chain
LESGGGLVQPGRSLRLSCKASGFNFAQYTMNWVRQAPGKGLEWIGLIRTTAYDAATHYAASVEGRFTISRDDSKSTAYLQINGLKTEDTAVYYCARPHGPGLSLGIYSAEYFDEWGQGTLVTVSSAS

SEQ ID NO: 22 - protein, 126 aa, Artificial Sequence
  J1  heavy chain
LEQSGPEVKKPGSSVKVSCKGSGDRFNDPVTWVRQAPGQGLEWIGGIIPAFGATKYAQKFQGRVVISADASTDTAYMELSSLRSEDTAVYYCAKVGVRGIILVGGLAMNWLDPWGQGTLVTVSAAS

SEQ ID NO: 23 - protein, 126 aa, Artificial Sequence
  J2  heavy chain
LEQSGPEVKKPGSSVKVSCKDSGDTFNEPVTWVRQAPGQGLEWIGGIIPAFGVTKYAQKFQGRVIISADASTATAYLELSSLRSEDTAVYYCAKVGLRGIVMVGGLAMNWLDPWGQGTQVTVSSAS

SEQ ID NO: 24 - protein, 126 aa, Artificial Sequence
  J3 and J3*  heavy chain
LEQSGPEVKKPGSSVKVSCKGSGDTFNDPVTWVRQAPGQGLEWIGGIIPLFGAAKYAQKFQGRVTISADASALTTYMEMSSLRPEDTAVYYCAKVGLRGITLVGGLAMNWLDPWGQGTLITVSSAS

SEQ ID NO: 25 - protein, 126 aa, Artificial Sequence
  J4  heavy chain
LEQSGAEVKKPGSSVRVSCEVSGDTFREPVSWVRQAPGQGFEWIGGIIPMFGATHYAQKLQGRITISADQSTNTVYMELRSLRSDDTAVYYCAKVGLRGINMVGGLAMNWFDPWGQGTLVTVSSAS

SEQ ID NO: 26 - protein, 127 aa, Artificial Sequence
  K  heavy chain
LEQSGPGLVKPGRPFSLTCAISGDSVSSDSAAWNWVRQSPSRGLEWLGRTFYRSKWYYDYTVSVKSRITINSDTSKNQFSLHLNSVTPEDTAVYYCVRDFYIGPTRDVYYGMDVWGQGTTVTVSSAS

SEQ ID NO: 27 - protein, 130 aa, Artificial Sequence
  L1  heavy chain
LEQSGAEVKKPGSSVKVSCKASGDTFRSYVITWARQAPGQGLEWMGAIIPFFGTTNLAQKFQGRVTITADESTQTVYMDLSSLRSDDTAVYYCAKAGDLSVGGVLAGGVPHLRHFDPWGQGTLVTVSSAS

SEQ ID NO: 28 - protein, 130 aa, Artificial Sequence
  L2  heavy chain
LEQSGAEVKMPGSSVKVSCKASGDTFRSSVITWARQAPGQGLEWMGAIIPFFGTTNLAQKFQGRVTITADESTKTVYMDLSSLRSDDTAVYYCAKAGDLSVGGVLAGGVPHLRHFDPWGQGTLVTVSSAS

SEQ ID NO: 29 - protein, 130 aa, Artificial Sequence
  L3  heavy chain
LEQSGAEVKKPGSSVKVSCKASGDTFRSYVITWARQAPGQGLEWMGAIIPFFGTTNLAQKFQGRVTITADESTKTVYMDLSSLTSDDTAVYYCAKAGDLSVGGVLAGGVPHLRHFDPWGQGTLVTVSSAS

SEQ ID NO: 30 - protein, 130 aa, Artificial Sequence
  L4  heavy chain
LEQSGAEVKKPGSSVKVSCKASGDTFRSYVITWARQAPGQGLEWMGAIIPFFGTTNLAQKFQGRVTITADESTKTVYMDLSSLRSDDTAVYYCAKAGDLSVGGVLAGGVPHLRHFDPWGQGTLVTVSSAS

SEQ ID NO: 31 - protein, 126 aa, Artificial Sequence
  M heavy chain
LEQSGAEVKKPGASVKVSCKASGYTFTNYAITWVRQAPGQGLEWMGWISGDSTNTYYGQKFQGRVTMTTDTSTSTAYMELTSLTSEDTAVYYCARESLYMIAFGRVIWPPLDYWGQGTLVTISSAS

SEQ ID NO: 32 - protein, 131 aa, Artificial Sequence
  A light chain
ELTQSPATLSVSPGESATLSCRASQSVSDNLAWYQQKPGQAPRLLIYGASSRAPAIPGRFSGSGSGTDFTLTISRLEPEDLAVYHCQQYGASPWTFGQGTKVEIKRTVAAPSVFIFPPSDEQLKSGTASVV

SEQ ID NO: 33 - protein, 134 aa, Artificial Sequence
  B1 light chain
ELTLTQSPGTLSLSPGERATLSCRASQSVSNSYLAWYQQKPGQAPRLLIYGASSRATGIPDRFSGSGSGTDFTLTISRLEPEDFAVYYCQQYGSSPQTFGQGTKVEIKRTVAAPSVFIFPPSDEQLKSGTASVV

SEQ ID NO: 34 - protein, 137 aa, Artificial Sequence
  B2 light chain
TLTQSPDSLAVSLGERATINCKSSQSVLYSSNNKNYLAWYQQKPGQPPQLLIYWASTRESGVPDRFSGSGSGTDFTLTISSLQAEDVAVYFCQQYYSTPFTFGPGTKVEIKRTVAAPSVFIFPPSDEQLKSGTASVV

SEQ ID NO: 35 - protein, 131 aa, Artificial Sequence
  B3 light chain
ELVMTQSPGTLSLSPGERATLSCRASQRVGSSYLAWYQQKPGQAPRLLVYGASSRATGIPDRFSGSGSGTDFTLTISRLQPEDFAVYYCQQYGTTFGQGTRVDIKRTVAAPSVSIFPPSDEQLKSGTASVV

SEQ ID NO: 36 - protein, 132 aa, Artificial Sequence
  C1 light chain
ELTLTQSPGTLSLSPGERATLSCRASQSVSGNYLAWYQQKPGQAPRLLIYGASNRATGIPHRFSGSGSGTDFTLTISRLEPEDFAVYYCQQYGSSPTFGQGTRVDIKRTVAAPSVFIFPPSDEQLKSGTASV

SEQ ID NO: 37 - protein, 120 aa, Artificial Sequence
  C1* light chain
ELTQSPSTLSLSPGEGATLSCRPSQSVSRNYLAWYQQKPGQAPRLLIYGASTRATGIPDRFSGSGSGTNFTLTISRLEPEDFAVYFCQHYGNSPPYTFGQGTKLEIKRTVAAPSVFIFPP

SEQ ID NO: 38 - protein, 120 aa, Artificial Sequence
  C2 light chain
ELTQSPGTLSLSPGERAALSCRASQSISTNYLAWYQQKPGQAPRLLIYGTSNRATGIPDRFSGTGSGTDFSLTISRLEPEDSAVYYCQQYGTSPFTFGPGTKVDIKRTVAAPSVFIFPPS

SEQ ID NO: 39 - protein, 132 aa, Artificial Sequence
  C2* light chain
ELTQSPGTLSLSPGERATLSCRASQSVSSSYLAWYQQKPGQAPRLLIYGASSRATGIPDRFSGSGSGTDFTLTISRLEPEDFAVYYCQQYGSSPQTFGQGTKVEIKRTVAAPSVFIFPPSDEQLKSGTASVV

SEQ ID NO: 40 - protein, 121 aa, Artificial Sequence
  C3 light chain
ELTQSPGTLSLSPGERATLSCRASQSVSSSYLAWYQQKPGQAPRLLIYGASSRATGIPDRFSGSGSGTDFTLTISGLEPEDFAVYYCQQYGSSPLTFGGGTKVEIKRTVAAPSVFIFPPSD

SEQ ID NO: 41 - protein, 132 aa, Artificial Sequence
  C4 light chain
ELTQSPGTLSLSPGERATLSCRASQSVSSSYLAWYQQKPGQAPRLLIYGASSRATGIPDRFSGSGSGTDFTLTISRLEPEDFAVYYCQHYGSSSYTFGQGTRVEIKRTVAAPSVFIFPPSDEQLKSGTASVV

SEQ ID NO: 42 - protein, 132 aa, Artificial Sequence
  C5 light chain
ELTQSPATLYVSPGERATLSCRASQSVPDNHLAWYQQKPGQTPRLLIYGASKRATGIPDRFSGSGSGTDFTLTISRLEPEDFAVYYCQQYGSSPQTFGQGTKVEIKRTVAAPSVFIFPPSDEQLKSGTASVV

SEQ ID NO: 43 - protein, 132 aa, Artificial Sequence
  C6 light chain
ELTQSPGTLSVSPGEAATLSCRASQSVSSNLAWYQQKPGQAPRLLIYGASTRATGIPARFSGSGSGTDFTLTISRLEPEDFAVYYCQQYGGSPPYTFGQGTKLEIKRTVAAPSVFIFPPSDEQLKSGTASVV

SEQ ID NO: 44 - protein, 131 aa, Artificial Sequence
  D1 light chain
ELTQSPGTLSLSPGERATLSCRASQSVSSSYLAWYQQKPGQAPRLLIYGASSRATGIPDRFSGSGSGTDFTLTISRLEPEDFAVYYCQQYGSSPQTFGQGTKVEIKRTVAAPSVFIFPPSDEQLKSGTASV

SEQ ID NO: 45 - protein, 120 aa, Artificial Sequence
  D2 light chain
ELTQSPATLSVSPGERATLSCRASQTISDNLAWYQQKPGQAPRLLIYGASSRATGIPDRFSGSGSGTDFTLTISRLEPEDFAVYYCQQYGSSPQTFGQGTKVEIKRTVAAPSVFIFPPSD

SEQ ID NO: 46 - protein, 131 aa, Artificial Sequence
  D3 light chain
ELTLTQSPGTLSLSPGERATLSCRASQTVSSSYLAWYQQKPGQAPRLLIYGASSRATGIPDRFSGSGSGTDFTLTISRLEPEDFAVYYCQQYGSSPQTFGQGTKVEIKRTVAAPSVFIFPPSDEQLKSGTA

SEQ ID NO: 47 - protein, 131 aa, Artificial Sequence
  D4 light chain
ELVMTQSPGTLSLSPGERATLSCRASQSVSSSYLAWYQQKPGQAPRLLIYGASSRATGIPDRFSGSGSGTDFTLTITRLEPEDFAVYYCQQYGSSPQTFGQGTKVQIKRTVAAPSVFIFPPSDEQLKSGTA

SEQ ID NO: 48 - protein, 136 aa, Artificial Sequence
  E light chain
ELVLTQSPLSLPVTLGQPASISCRSTQSLVYSDGNTYLNWFHQRAGQPPRRLIYKVSNRDSGVPERFSGSGSGTDFTLKISRVEAEDVGIYYCMQGAHWPPTFGGGTKVEINRTVAAPSVFIFPPSDEQLKSGTAS

SEQ ID NO: 49 - protein, 122 aa, Artificial Sequence
  F light chain
ELQMTQSPSFLSASVGDRVTITCRASQGISSYLAWYQQKPGKAPKLLISSVSTLQSGVSSRFSGSGSGTGFTLTISSLQSEDSATYYCEQLNSFPYTFGQGTKLEIKRTVAAPSVFIFPPSD

SEQ ID NO: 50 - protein, 125 aa, Artificial Sequence
  G light chain
ELTQSPVSLPVTPGEPASISCRSSQSLLHSNGNHYLDWYLQKPGQSPQLLMYLGSNRASGVPDRFSGSGSGTDFTLKISRVEAEDVGVYYCMQGLQTPWTFGQGTKVEIKRTVAAPSVFIFPPSD

SEQ ID NO: 51 - protein, 123 aa, Artificial Sequence
  H1 light chain
ELTLTQSPGTLSLSPGERATLSCRASQSISSSYLAWYQQKPGQAPRLLIYGASRRATGIPDRFSGSGSGTDFTLTISRLEPEDFAVYYCQQYGSSPLTFGGGTKVEIKRTVAAPSVFIFPPSD

SEQ ID NO: 52 - protein, 122 aa, Artificial Sequence
  H1* light chain
ELTQSPATLSVSPGERATLSCRASRGISSNLAWYQQKPGQAPRLLIYGASSRATGIPDRFSGSGSGTDFTLTISRLEPEDFAVYYCQQYGSSPQTFGQGTEVEIKRTVAAPSVFIFPPSDEQ

SEQ ID NO: 53 - protein, 136 aa, Artificial Sequence
  H1** light chain
ELTLTQSPGTLSLSPGERATLSCRASQSVSSDSLAWYQQKPGQAPRLLIYGASSRATGIPDRFSGSGSGTDFTLTISRLEPEDLGVYYCQQYGPSPPGYTFGQGTKLEIKRTVAAPSVFIFPPSDEQLKSGTASVV

SEQ ID NO: 54 - protein, 134 aa, Artificial Sequence
  H2 light chain
ELTLTQSPGTLSLSPGERGTLSCRASQSVSSSYLAWYQQKPGQAPRLLIYGASSRATGIPDRFSGSGSGTDFTLTISRLEPEDFAVYYCQQYGSSPQTFGQGTKVEIKRTVAAPSVFIFPPSDEQLKSGTASVV

SEQ ID NO: 55 - protein, 131 aa, Artificial Sequence
  H3 light chain
ELTQSPATLSVSPGERATLSCRASQSVSSNLAWYQQKPGQAPRLLIYGASTRATGIPARFSGSGSGTEFTLTVSRLEPEDSAVYFCQQYYRSPLTFGGGTKVEIKRTVAAPSVFIFPPSDEQLKSGTASVV

SEQ ID NO: 56 - protein, 122 aa, Artificial Sequence
  I light chain
ELTLTQSPATLSVSPGERATLFCRANQSVGRNLAWYQQKPGQAPRLLIYGISTRTTTTPTRFSGSGSGTDFTLTISRLQSEDFAVYYCQQYNKWPPWTFGQGTKLEIKRTVAAPSVFVFPPS

SEQ ID NO: 57 - protein, 134 aa, Artificial Sequence
  J1 light chain
ELVLTQSPGTLSLSPGERATLSCRASQSVSSSYLAWYQQKPGQAPRLLIYGASSRATGIPDRFSGSGSGTDFALTITRLEPEDFAVYYCQQYGSSPQTFGQGTKVEIKRTVAAPSVFIFPPSDEQLKSGTASVV

SEQ ID NO: 58 - protein, 132 aa, Artificial Sequence; identical to SEQ ID NO: 39
  J2 light chain

SEQ ID NO: 59 - protein, 131 aa, Artificial Sequence
  J3 light chain
ELTQSPGTLSLSPGERATLSCRASQSVSSSYLAWYQQKPGQAPRLLIYGASSRATGIPDRFSGSGSGTDFTLTISGLEPEDFAVYYCQQYGSSPQTFGQGTKVEIKRTVAAPSVFIFPPSDEQLKSGTASV

SEQ ID NO: 60 - protein, 134 aa, Artificial Sequence
  J3* light chain
EFTLTQSPGTLSLSPGERGTLSCRASQSVSSSYLAWYQQKPGQAPRLLIYGASSRATGIPDRFSGSGSGTDFTLTISRLEPEDFAVYYCQQYGSSPQTFGQGTKVEIKRTVAAPSVFIFPPSDEQLKSGTASVV

SEQ ID NO: 61 - protein, 134 aa, Artificial Sequence
  J4 light chain
ELTLTQSPGTLSLSPGERATLSCRASQSVSSSHLAWYQQKPGQAPRLLIYGASSRATGIPDRFSGSGSGTDFTLTISRLEPEDFAVYYCQQYGSSPQTFGQGTEVEIKRTVAAPSVFIFPPSDEQLKSGTASVV

SEQ ID NO: 62 - protein, 134 aa, Artificial Sequence
  K light chain
ELTQSPGTLSLSPGERATLSCRASQSVSSNSLAWYQQKPGLAPRLLIYGASSRATGIPERFSGSGAGTGFTLTISTLEPEDFAIYYCQQYGGSPPRFTFGPGTKVDIRRTVAAPSVFIFPPSDEQLKSGTASVV

SEQ ID NO: 63 - protein, 132 aa, Artificial Sequence
  L1 and L2 light chain
ELTQSPGTLSLSPGERATLSCRASQSITSRYLAWYQQKPGQAPRLLIYGASSRATGIPDRFSGSGSGTDFTLTISRLEPEDFAVYYCQQYGDSPVGFGPGTKVEIKRTVAAPSVFIFPPSDEQLKSGTASVV

SEQ ID NO: 64 - protein, 133 aa, Artificial Sequence
  L3 light chain
ELVMTQSPATLSLSPGERATLSCRASQSVGSYLAWYQQKPGQAPRLLIYDASNRATGIPARFSGSGSGTDFTLTISSLEPEDFAVYFCQQYGSSPLTFGQGTKVEIKRTVAAPSVFIFPPSDEQLKSGTASVV

SEQ ID NO: 65 - protein, 132 aa, Artificial Sequence
  L4 light chain
ELTQSPGTLSLSPGERATLSCRAGQTVASNSLAWYQHKPGQAPRLLIYGASIRASGIPDRFSGSGSGTDFTLTISRLEPEDFAVYYCQQYGLSPSTFGQGTRLEIKRTVAAPSVFIFPPSDEQLKSGTASVV

SEQ ID NO: 66 - protein, 130 aa, Artificial Sequence
  M light chain
ELTLTQSPGTLSLSPGERATLSCRASQSIRSSYLAWYQQKPGQAPRLLIYAAASRATGIPDRFSGSGSGTDFTLTISRLEPEDFAVYFCHHYGGSPRTFGQGTKVEIKRTVAAPSVFIFPPSDEQLKSGT

SEQ ID NO: 67 - protein, 126 aa, Artificial Sequence
  YKns3a1 heavy chain
LLESGPGLVKPSQTLSLTCDISGDSVSSHSAAWNWIRQSPRGLEWLGRTYYRSNWYNDYSVSVRSRIIISADTSKNQFSLQLNSVTPEDTAVYYCARDRFYGPGGDLYYGLDVWGQGTTVTVSSAS

SEQ ID NO: 68 - protein, 126 aa, Artificial Sequence
  YKns3a2 heavy chain
LLESGPGLVKPSQTLSLTCDISGDSVSSHSAAWNWIRQSPRGLEWLGRTYYRSNWYNDYSVSVRSRIIISADTSKNQLSLQLNSVTPEDTAVYYCARDRFYGPGGDLYYGLDVWGQGTTVTVSSAS

SEQ ID NO: 69 - protein, 126 aa, Artificial Sequence
  YKns3b1 heavy chain
LLESGPGLVKPSQTLSLTCDISGDSVSSNSAAWNWIRQSPRGLEWLGRTFYRSNWYNDYAVSVKSRITINPDTSKNQFSLQLNSVTPEDTAVYYCARDLYIGPTTDFYYGMDVWGQGTTVTVSSAS

SEQ ID NO: 70 - protein, 126 aa, Artificial Sequence
  YKns3b2 heavy chain
LLESGPGLVRPSQTLSLTCDISGDSVSSNSAAWNWIRQSPRGLEWLGRTFYRSNWYNDYAVSVKSRITINPDTSKNQFSLQLNSVTPEDTAVYYCARDLYIGPTTDFYYGMDVWGQGTTVTVSSAS

SEQ ID NO: 71 - protein, 126 aa, Artificial Sequence
  YKns3c heavy chain
LLESGPGLVKPSQTLSLTCAISGDSVSSNSAAWNWIRQSPRGLEWLGRTFYRSKWYYDYAVSVKSRITINPDTSKNQFSLHLNSVTPEDTAVYYCVRDFYIGPTRDFYYGMDVWGQGTTVTVSSAS

SEQ ID NO: 72 - protein, 123 aa, Artificial Sequence
  YKns3a1 light chain
ELTQSPGTLSLSPGERATLSCRASQSVSSSYKAWYQQKPGQAPRLLIYGASSRATGIPDRFSGSGSGTDFTLTISRLEPEDFAVYYCQQYGSSPQTFGQGTKVEIKRTVAAPSVFIFPPSDEQ

SEQ ID NO: 73 - protein, 123 aa, Artificial Sequence
  YKns3a1* light chain
ELTQSPGTLSLSPGERGTLSCRASQSVSSSYKAWYQQKPGQAPRLLIYGASSRATGIPDRFSGSGSGTDFTLTISRLEPEDFAVYYCQQYGSSPQTFGQGTKVEIKRTVAAPSVFIFPPSDEQ

SEQ ID NO: 74 - protein, 123 aa, Artificial Sequence; identical to SEQ ID NO: 72
  YKns3a2 light chain

SEQ ID NO: 75 - protein, 125 aa, Artificial Sequence
  YKns3b1 light chain
ELTLTQSPGTLSLSPGERATLSCRASQSVSSSYKAWYQQKPGQAPRLLIYGASSRATGIPDRFSGSGSGTDFTLTISRLEPEDFAVYYCQQYGSSPQTFGQGTKVEIKRTVAAPSVFIFPPSDEQ

SEQ ID NO: 76 - protein, 123 aa, Artificial Sequence; identical to SEQ ID NO: 72
  YKns3b2 light chain

SEQ ID NO: 77 - protein, 123 aa, Artificial Sequence; identical to SEQ ID NO: 72
  YKns3c light chain

SEQ ID NO: 78 - protein, 8 aa, Artificial Sequence
  A CDRH1
TFSSFVIN

SEQ ID NO: 79 - protein, 5 aa, Artificial Sequence
  B1 CDRH1
SYTIT

SEQ ID NO: 80 - protein, 5 aa, Artificial Sequence
  B2 CDRH1
SYTIT

SEQ ID NO: 81 - protein, 5 aa, Artificial Sequence
  B3 CDRH1
SYTIT

SEQ ID NO: 82 - protein, 5 aa, Artificial Sequence
  C1 and C1* CDRH1
SYSIN

SEQ ID NO: 83 - protein, 5 aa, Artificial Sequence
  C2 and C2* CDRH1
SYSVN

SEQ ID NO: 84 - protein, 5 aa, Artificial Sequence
  C3 CDRH1
SYSIN

SEQ ID NO: 85 - protein, 5 aa, Artificial Sequence
  C4 CDRH1
SYSIN

SEQ ID NO: 86 - protein, 5 aa, Artificial Sequence
  C5 CDRH1
SYSIN

SEQ ID NO: 87 - protein, 5 aa, Artificial Sequence
  C6 CDRH1
SYSIN

SEQ ID NO: 88 - protein, 5 aa, Artificial Sequence
  D1 CDRH1
SFAMS

SEQ ID NO: 89 - protein, 5 aa, Artificial Sequence
  D2 CDRH1
SFAMS

SEQ ID NO: 90 - protein, 5 aa, Artificial Sequence
  D3 CDRH1
SFAMS

SEQ ID NO: 91 - protein, 5 aa, Artificial Sequence
  D4 CDRH1
SFAMS

SEQ ID NO: 92 - protein, 5 aa, Artificial Sequence
  E CDRH1
AYTLS

SEQ ID NO: 93 - protein, 5 aa, Artificial Sequence
  F CDRH1
SERLS

SEQ ID NO: 94 - protein, 5 aa, Artificial Sequence
  G CDRH1
DYGVT

SEQ ID NO: 95 - protein, 5 aa, Artificial Sequence
  H1, H1* and H1** CDRH1
NYSLN

SEQ ID NO: 96 - protein, 5 aa, Artificial Sequence
  H2 CDRH1
NYALN

SEQ ID NO: 97 - protein, 5 aa, Artificial Sequence
  H3 CDRH1
NYALN

SEQ ID NO: 98 - protein, 5 aa, Artificial Sequence
  I CDRH1
QYTMN

SEQ ID NO: 99 - protein, 4 aa, Artificial Sequence
  J1 CDRH1
DPVT

SEQ ID NO: 100 - protein, 4 aa, Artificial Sequence
  J2 CDRH1
EPVT

SEQ ID NO: 101 - protein, 4 aa, Artificial Sequence
  J3 and J3* CDRH1
DPVT

SEQ ID NO: 102 - protein, 4 aa, Artificial Sequence
  J4 CDRH1
EPVS

SEQ ID NO: 103 - protein, 7 aa, Artificial Sequence
  K CDRH1
SDSAAWN

SEQ ID NO: 104 - protein, 5 aa, Artificial Sequence
  L1 CDRH1
SYVIT

SEQ ID NO: 105 - protein, 5 aa, Artificial Sequence
  L2 CDRH1
SSVIT

SEQ ID NO: 106 - protein, 5 aa, Artificial Sequence
  L3 CDRH1
SYVIT

SEQ ID NO: 107 - protein, 5 aa, Artificial Sequence
  L4 CDRH1
SYVIT

SEQ ID NO: 108 - protein, 5 aa, Artificial Sequence
  M CDRH1
NYAIT

SEQ ID NO: 109 - protein, 31 aa, Artificial Sequence
  A CDRH2
GIFQAPGPEREWLRDINPISGTINYAQRFQG

SEQ ID NO: 110 - protein, 17 aa, Artificial Sequence
  B1 CDRH2
GIILMTGKANYAQKFQG

SEQ ID NO: 111 - protein, 17 aa, Artificial Sequence
  B2 CDRH2
GIILMTGKANYAQKFQG

SEQ ID NO: 112 - protein, 17 aa, Artificial Sequence
  B3 CDRH2
GIILMTGKANYAQKFQG

SEQ ID NO: 113 - protein, 17 aa, Artificial Sequence
  C1 and C1* CDRH2
TFIPMFGTSKYAQKFQG

SEQ ID NO: 114 - protein, 17 aa, Artificial Sequence
  C2 and C2* CDRH2
TLIPMFGTSSYAQKFQG

SEQ ID NO: 115 - protein, 17 aa, Artificial Sequence
  C3 CDRH2
TLIPMFGTSNYAQKFQG

SEQ ID NO: 116 - protein, 17 aa, Artificial Sequence
  C4 CDRH2
TLIPMFGTSKYAQKLQG

SEQ ID NO: 117 - protein, 17 aa, Artificial Sequence
  C5 CDRH2
TLIPMFGTSNYAQKFQG

SEQ ID NO: 118 - protein, 17 aa, Artificial Sequence
  C6 CDRH2
TIIPMFGTSKYAQKLQG

SEQ ID NO: 119 - protein, 18 aa, Artificial Sequence
  D1 CDRH2
SIAGGTLGRTSYRDSVKG

SEQ ID NO: 120 - protein, 18 aa, Artificial Sequence
  D2 CDRH2
SIAGGTLGRTSYRDSVKG

SEQ ID NO: 121 - protein, 18 aa, Artificial Sequence
  D3 CDRH2
SIAGGTLGRTSYRDSVKG

SEQ ID NO: 122 - protein, 18 aa, Artificial Sequence
  D4 CDRH2
SIAGGTLGRTSYRDSVKG

SEQ ID NO: 123 - protein, 17 aa, Artificial Sequence
  E CDRH2
RIMPTVGITNYAQKFQG

SEQ ID NO: 124 - protein, 17 aa, Artificial Sequence
  F CDRH2
WISAYNGGINYSQKFQG

SEQ ID NO: 125 - protein, 17 aa, Artificial Sequence
  G CDRH2
WISAYSGNTFYARKFQG

SEQ ID NO: 126 - protein, 17 aa, Artificial Sequence
  H1, H1* and H1** CDRH2
GVVPLFGTTKYAQKFQG

SEQ ID NO: 127 - protein, 17 aa, Artificial Sequence
  H2 CDRH2
GVVPLFGTTKYAQKFQG

SEQ ID NO: 128 - protein, 17 aa, Artificial Sequence
  H3 CDRH2
GVVPLFGTTRNAQKFQG

SEQ ID NO: 129 - protein, 19 aa, Artificial Sequence
  I CDRH2
LIRTTAYDAATHYAASVEG

SEQ ID NO: 130 - protein, 17 aa, Artificial Sequence
  J1 CDRH2
GIIPAFGATKYAQKFQG

SEQ ID NO: 131 - protein, 17 aa, Artificial Sequence
  J2 CDRH2
GIIPAFGVTKYAQKFQG

SEQ ID NO: 132 - protein, 17 aa, Artificial Sequence
  J3 and J3* CDRH2
GIIPLFGAAKYAQKFQG

SEQ ID NO: 133 - protein, 17 aa, Artificial Sequence
  J4 CDRH2
GIIPMFGATHYAQKLQG

SEQ ID NO: 134 - protein, 18 aa, Artificial Sequence
  K CDRH2
RTFYRSKWYYDYTVSVKS

SEQ ID NO: 135 - protein, 17 aa, Artificial Sequence
  L1 CDRH2
AIIPFFGTTNLAQKFQG

SEQ ID NO: 136 - protein, 17 aa, Artificial Sequence
  L2 CDRH2
AIIPFFGTTNLAQKFQG

SEQ ID NO: 137 - protein, 17 aa, Artificial Sequence
  L3 CDRH2
AIIPFFGTTNLAQKFQG

SEQ ID NO: 138 - protein, 17 aa, Artificial Sequence
  L4 CDRH2
AIIPFFGTTNLAQKFQG

SEQ ID NO: 139 - protein, 17 aa, Artificial Sequence
  M CDRH2
WISGDSTNTYYGQKFQG

SEQ ID NO: 140 - protein, 19 aa, Artificial Sequence
  A CDRH3
ENKFRYCRGGSCYSGAFDM

SEQ ID NO: 141 - protein, 15 aa, Artificial Sequence
  B1 CDRH3
DPYVYAGDDVWSLSR

SEQ ID NO: 142 - protein, 15 aa, Artificial Sequence
  B2 CDRH3
DPYVYAGDDVRSLSR

SEQ ID NO: 143 - protein, 15 aa, Artificial Sequence
  B3 CDRH3
DPYVYAGDDVWSLSR

SEQ ID NO: 144 - protein, 18 aa, Artificial Sequence
  C1 and C1* CDRH3
PETPRYCSGGFCYGEFDN

SEQ ID NO: 145 - protein, 18 aa, Artificial Sequence
  C2 and C2* CDRH3
PETPRYCRGGFCYGEFDN

SEQ ID NO: 146 - protein, 18 aa, Artificial Sequence
  C3 CDRH3
PETPRYCSGGVCYGEFDN

SEQ ID NO: 147 - protein, 18 aa, Artificial Sequence
  C4 CDRH3
PETPRYCSGGFCYGEFDN

SEQ ID NO: 148 - protein, 18 aa, Artificial Sequence
  C5 CDRH3
PETPRYCSGGFCYGEFDN

SEQ ID NO: 149 - protein, 18 aa, Artificial Sequence
  C6 CDRH3
PETPRYCSGGFCYGEFDN

SEQ ID NO: 150 - protein, 14 aa, Artificial Sequence
  D1 CDRH3
DPLLFAGGPNWFDH

SEQ ID NO: 151 - protein, 14 aa, Artificial Sequence
  D2 CDRH3
DPLLFAGGPNWFDH

SEQ ID NO: 152 - protein, 14 aa, Artificial Sequence
  D3 CDRH3
DPLLFAGGPNWFDH

SEQ ID NO: 153 - protein, 14 aa, Artificial Sequence
  D4 CDRH3
DPLLFAGGPNWFDH

SEQ ID NO: 154 - protein, 12 aa, Artificial Sequence
  E CDRH3
GPYVGLGEGFSE

SEQ ID NO: 155 - protein, 5 aa, Artificial Sequence
  F CDRH3
GGGTE

SEQ ID NO: 156 - protein, 18 aa, Artificial Sequence
  G CDRH3
DRGLAINGVVFPYFGLDV

SEQ ID NO: 157 - protein, 18 aa, Artificial Sequence
  H1, H1* and H1** CDRH3
SVTPRHCGGGFCYGEFDY

SEQ ID NO: 158 - protein, 18 aa, Artificial Sequence
  H2 CDRH3
SVTPRHCGGGFCYGEFDY

SEQ ID NO: 159 - protein, 18 aa, Artificial Sequence
  H3 CDRH3
SVTPRYCGGGFCYGEFDY

SEQ ID NO: 160 - protein, 18 aa, Artificial Sequence
  I CDRH3
PHGPGLSLGIYSAEYFDE

SEQ ID NO: 161 - protein, 19 aa, Artificial Sequence
  J1 CDRH3
VGVRGIILVGGLAMNWLDP

SEQ ID NO: 162 - protein, 19 aa, Artificial Sequence
  J2 CDRH3
VGLRGIVMVGGLAMNWLDP

SEQ ID NO: 163 - protein, 19 aa, Artificial Sequence
  J3 and J3* CDRH3
VGLRGITLVGGLAMNWLDP

SEQ ID NO: 164 - protein, 19 aa, Artificial Sequence
  J4 CDRH3
VGLRGINMVGGLAMNWFDP

SEQ ID NO: 165 - protein, 16 aa, Artificial Sequence
  K CDRH3
DFYIGPTRDVYYGMDV

SEQ ID NO: 166 - protein, 22 aa, Artificial Sequence
  L1 CDRH3
AGDLSVGGVLAGGVPHLRHFDP

SEQ ID NO: 167 - protein, 22 aa, Artificial Sequence
  L2 CDRH3
AGDLSVGGVLAGGVPHLRHFDP

SEQ ID NO: 168 - protein, 22 aa, Artificial Sequence
  L3 CDRH3
AGDLSVGGVLAGGVPHLRHFDP

SEQ ID NO: 169 - protein, 22 aa, Artificial Sequence
  L4 CDRH3
AGDLSVGGVLAGGVPHLRHFDP

SEQ ID NO: 170 - protein, 18 aa, Artificial Sequence
  M CDRH3
ESLYMIAFGRVIWPPLDY

SEQ ID NO: 171 - protein, 11 aa, Artificial Sequence
  A CDRL1
RASQSVSDNLA

SEQ ID NO: 172 - protein, 12 aa, Artificial Sequence
  B1 CDRL1
RASQSVSNSYLA

SEQ ID NO: 173 - protein, 17 aa, Artificial Sequence
  B2 CDRL1
KSSQSVLYSSNNKNVLA

SEQ ID NO: 174 - protein, 12 aa, Artificial Sequence
  B3 CDRL1
RASQRVGSSYLA

SEQ ID NO: 175 - protein, 12 aa, Artificial Sequence
  C1 CDRL1
RASQSVSGNYLA

SEQ ID NO: 176 - protein, 12 aa, Artificial Sequence
  C1* CDRL1
RPSQSVSRNYLA

SEQ ID NO: 177 - protein, 12 aa, Artificial Sequence
  C2 CDRL1
RASQSISTNYLA

SEQ ID NO: 178 - protein, 12 aa, Artificial Sequence
  C2* CDRL1
RASQSVSSSYLA

SEQ ID NO: 179 - protein, 12 aa, Artificial Sequence
  C3 CDRL1
RASQSVSSSYLA

SEQ ID NO: 180 - protein, 12 aa, Artificial Sequence
  C4 CDRL1
RASQSVSSSYLA

SEQ ID NO: 181 - protein, 12 aa, Artificial Sequence
  C5 CDRL1
RASQSVPDNHLA

SEQ ID NO: 182 - protein, 11 aa, Artificial Sequence
  C6 CDRL1
RASQSVSSNLA

SEQ ID NO: 183 - protein, 12 aa, Artificial Sequence
  D1 CDRL1
RASQSVSSSYLA

SEQ ID NO: 184 - protein, 11 aa, Artificial Sequence
  D2 CDRL1
RASQTTSDNLA

SEQ ID NO: 185 - protein, 12 aa, Artificial Sequence
  D3 CDRL1
RASQTVSSSYLA

SEQ ID NO: 186 - protein, 12 aa, Artificial Sequence
  D4 CDRL1
RASQSVSSSYLA

SEQ ID NO: 187 - protein, 16 aa, Artificial Sequence
  E CDRL1
RSTQSLVYSDGNTYLN

SEQ ID NO: 188 - protein, 11 aa, Artificial Sequence
  F CDRL1
RASQGISSYLA

SEQ ID NO: 189 - protein, 16 aa, Artificial Sequence
  G CDRL1
RSSQSLLHSNGNHYLD

SEQ ID NO: 190 - protein, 12 aa, Artificial Sequence
  H1 CDRL1
RASQSISSSYLA

SEQ ID NO: 191 - protein, 11 aa, Artificial Sequence
  H1* CDRL1
RASRGISSNLA

SEQ ID NO: 192 - protein, 12 aa, Artificial Sequence
  H1** CDRL1
RASQSVSSDSLA

SEQ ID NO: 193 - protein, 12 aa, Artificial Sequence
  H2 CDRL1
RASQSVSSSYLA

SEQ ID NO: 194 - protein, 11 aa, Artificial Sequence
  H3 CDRL1
RASQSVSSNLA

SEQ ID NO: 195 - protein, 11 aa, Artificial Sequence
  I CDRL1
RANQSVGRNLA

SEQ ID NO: 196 - protein, 12 aa, Artificial Sequence
  J1 CDRL1
RASQSVSSSYLA

SEQ ID NO: 197 - protein, 12 aa, Artificial Sequence
  J2 CDRL1
RASQSVSSSYLA

SEQ ID NO: 198 - protein, 12 aa, Artificial Sequence
  J3 CDRL1
RASQSVSSSYLA

SEQ ID NO: 199 - protein, 12 aa, Artificial Sequence
  J3* CDRL1
RASQSVSSSYLA

SEQ ID NO: 200 - protein, 12 aa, Artificial Sequence
  J4 CDRL1
RASQSVSSSHLA

SEQ ID NO: 201 - protein, 12 aa, Artificial Sequence
  K CDRL1
RASQSVSSNSLA

SEQ ID NO: 202 - protein, 12 aa, Artificial Sequence
  L1 and L2 CDRL1
RASQSITSRYLA

SEQ ID NO: 203 - protein, 11 aa, Artificial Sequence
  L3 CDRL1
RASQSVGSYLA

SEQ ID NO: 204 - protein, 12 aa, Artificial Sequence
  L4 CDRL1
RAGQTVASNSLA

SEQ ID NO: 205 - protein, 12 aa, Artificial Sequence
  M CDRL1
RASQSIRSSYLA

SEQ ID NO: 206 - protein, 7 aa, Artificial Sequence
  A CDRL2
GASSRAP

SEQ ID NO: 207 - protein, 7 aa, Artificial Sequence
  B1 CDRL2
GASSRAT

SEQ ID NO: 208 - protein, 7 aa, Artificial Sequence
  B2 CDRL2
WASTRES

SEQ ID NO: 209 - protein, 7 aa, Artificial Sequence
  B3 CDRL2
GASSRAT

SEQ ID NO: 210 - protein, 7 aa, Artificial Sequence
  C1 CDRL2
GASNRAT

SEQ ID NO: 211 - protein, 7 aa, Artificial Sequence
  C1* CDRL2
GASTRAT

SEQ ID NO: 212 - protein, 7 aa, Artificial Sequence
  C2 CDRL2
GTSNRAT

SEQ ID NO: 213 - protein, 7 aa, Artificial Sequence
  C2* CDRL2
GASSRAT

SEQ ID NO: 214 - protein, 7 aa, Artificial Sequence
  C3 CDRL2
GASSRAT

SEQ ID NO: 215 - protein, 7 aa, Artificial Sequence
  C4 CDRL2
GASSRAT

SEQ ID NO: 216 - protein, 7 aa, Artificial Sequence
  C5 CDRL2
GASKRAT

SEQ ID NO: 217 - protein, 7 aa, Artificial Sequence
  C6 CDRL2
GASTRAT

SEQ ID NO: 218 - protein, 7 aa, Artificial Sequence
  D1 CDRL2
GASSRAT

SEQ ID NO: 219 - protein, 7 aa, Artificial Sequence
  D2 CDRL2
GASSRAT

SEQ ID NO: 220 - protein, 7 aa, Artificial Sequence
  D3 CDRL2
GASSRAT

SEQ ID NO: 221 - protein, 7 aa, Artificial Sequence
  D4 CDRL2
GASSRAT

SEQ ID NO: 222 - protein, 7 aa, Artificial Sequence
  E CDRL2
KVSNRDS

SEQ ID NO: 223 - protein, 7 aa, Artificial Sequence
  F CDRL2
SVSTLQS

SEQ ID NO: 224 - protein, 7 aa, Artificial Sequence
  G CDRL2
LGSNRAS

SEQ ID NO: 225 - protein, 7 aa, Artificial Sequence
  H1 CDRL2
GASRRAT

SEQ ID NO: 226 - protein, 7 aa, Artificial Sequence
  H1* CDRL2
GASSRAT

SEQ ID NO: 227 - protein, 7 aa, Artificial Sequence
  H1** CDRL2
GASSRAT

SEQ ID NO: 228 - protein, 7 aa, Artificial Sequence
  H2 CDRL2
GASSRAT

SEQ ID NO: 229 - protein, 7 aa, Artificial Sequence
  H3 CDRL2
GASTRAT

SEQ ID NO: 230 - protein, 7 aa, Artificial Sequence
  I CDRL2
GISTRTT

SEQ ID NO: 231 - protein, 7 aa, Artificial Sequence
  J1 CDRL2
GASSRAT

SEQ ID NO: 232 - protein, 7 aa, Artificial Sequence
  J2 CDRL2
GASSRAT

SEQ ID NO: 233 - protein, 7 aa, Artificial Sequence
  J3 CDRL2
GASSRAT

SEQ ID NO: 234 - protein, 7 aa, Artificial Sequence
  J3* CDRL2
GASSRAT

SEQ ID NO: 235 - protein, 7 aa, Artificial Sequence
  J4 CDRL2
GASSRAT

SEQ ID NO: 236 - protein, 7 aa, Artificial Sequence
  K CDRL2
GASSRAT

SEQ ID NO: 237 - protein, 7 aa, Artificial Sequence
  L1 and L2 CDRL2
GASSRAT

SEQ ID NO: 238 - protein, 7 aa, Artificial Sequence
  L3 CDRL2
DASNRAT

SEQ ID NO: 239 - protein, 7 aa, Artificial Sequence
  L4 CDRL2
GASIRAS

SEQ ID NO: 240 - protein, 7 aa, Artificial Sequence
  M CDRL2
AAASRAT

SEQ ID NO: 241 - protein, 9 aa, Artificial Sequence
  A CDRL3
QQYGASPWT

SEQ ID NO: 242 - protein, 9 aa, Artificial Sequence
  B1 CDRL3
QQYGSSPQT

SEQ ID NO: 243 - protein, 9 aa, Artificial Sequence
  B2 CDRL3
QQYYSTPFT

SEQ ID NO: 244 - protein, 6 aa, Artificial Sequence
  B3 CDRL3
QQYGTT

SEQ ID NO: 245 - protein, 8 aa, Artificial Sequence
  C1 CDRL3
QQYGSSPT

SEQ ID NO: 246 - protein, 10 aa, Artificial Sequence
  C1* CDRL3
QHYGNSPPYT

SEQ ID NO: 247 - protein, 9 aa, Artificial Sequence
  C2 CDRL3
QQYGTSPFT

SEQ ID NO: 248 - protein, 9 aa, Artificial Sequence
  C2* CDRL3
QQYGSSPQT

SEQ ID NO: 249 - protein, 9 aa, Artificial Sequence
  C3 CDRL3
QQYGSSPLT

SEQ ID NO: 250 - protein, 9 aa, Artificial Sequence
  C4 CDRL3
QHYGSSSYT

SEQ ID NO: 251 - protein, 9 aa, Artificial Sequence
  C5 CDRL3
QQYGSSPQT

SEQ ID NO: 252 - protein, 10 aa, Artificial Sequence
  C6 CDRL3
QQYGGSPPYT

SEQ ID NO: 253 - protein, 9 aa, Artificial Sequence
  D1 CDRL3
QQYGSSPQT

SEQ ID NO: 254 - protein, 9 aa, Artificial Sequence
  D2 CDRL3
QQYGSSPQT

SEQ ID NO: 255 - protein, 9 aa, Artificial Sequence
  D3 CDRL3
QQYGSSPQT

SEQ ID NO: 256 - protein, 9 aa, Artificial Sequence
  D4 CDRL3
QQYGSSPQT

SEQ ID NO: 257 - protein, 9 aa, Artificial Sequence
  E CDRL3
MQGAHWPPT

SEQ ID NO: 258 - protein, 9 aa, Artificial Sequence
  F CDRL3
EQLNSFPYT

SEQ ID NO: 259 - protein, 9 aa, Artificial Sequence
  G CDRL3
MQGLQTPWT

SEQ ID NO: 260 - protein, 9 aa, Artificial Sequence
  H1 CDRL3
QQYGSSPLT

SEQ ID NO: 261 - protein, 9 aa, Artificial Sequence
  H1* CDRL3
QQYGSSPQT

SEQ ID NO: 262 - protein, 11 aa, Artificial Sequence
  H1** CDRL3
QQYGPSPPGYT

SEQ ID NO: 263 - protein, 9 aa, Artificial Sequence
  H2 CDRL3
QQYGSSPQT

SEQ ID NO: 264 - protein, 9 aa, Artificial Sequence
  H3 CDRL3
QQYYRSPLT

SEQ ID NO: 265 - protein, 10 aa, Artificial Sequence
  I CDRL3
QQYNKWPPWT

SEQ ID NO: 266 - protein, 9 aa, Artificial Sequence
  J1 CDRL3
QQYGSSPQT

SEQ ID NO: 267 - protein, 9 aa, Artificial Sequence
  J2 CDRL3
QQYGSSPQT

SEQ ID NO: 268 - protein, 9 aa, Artificial Sequence
  J3 CDRL3
QQYGSSPQT

SEQ ID NO: 269 - protein, 9 aa, Artificial Sequence
  J3* CDRL3
QQYGSSPQT

SEQ ID NO: 270 - protein, 9 aa, Artificial Sequence
  J4 CDRL3
QQYGSSPQT

SEQ ID NO: 271 - protein, 11 aa, Artificial Sequence
  K CDRL3
QQYGGSPPRFT

SEQ ID NO: 272 - protein, 8 aa, Artificial Sequence
  L1 and L2 CDRL3
QQYGDSVG

SEQ ID NO: 273 - protein, 9 aa, Artificial Sequence
  L3 CDRL3
QQYGSSPLT

SEQ ID NO: 274 - protein, 8 aa, Artificial Sequence
  L4 CDRL3
QQYGLSST

SEQ ID NO: 275 - protein, 9 aa, Artificial Sequence
  M CDRL3
HHYGGSPRT

SEQ ID NO: 276 - protein, 8 aa, Artificial Sequence
  YKns3a1 CDRH1
SSHSAAWN

SEQ ID NO: 277 - protein, 8 aa, Artificial Sequence
  YKns3a2 CDRH1
SSHSAAWN

SEQ ID NO: 278 - protein, 8 aa, Artificial Sequence
  YKns3b1 CDRH1
SSHSAAWN

SEQ ID NO: 279 - protein, 8 aa, Artificial Sequence
  YKns3b2 CDRH1
SSHSAAWN

SEQ ID NO: 280 - protein, 8 aa, Artificial Sequence
  YKns3c CDRH1
SSHSAAWN

SEQ ID NO: 281 - protein, 17 aa, Artificial Sequence
  YKns3a1 CDRH2
TYYRSNWYNDYSVSVRS

SEQ ID NO: 282 - protein, 17 aa, Artificial Sequence
  YKns3a2 CDRH2
TYYRSNWYNDYSVSVRS

SEQ ID NO: 283 - protein, 17 aa, Artificial Sequence
  YKns3b1 CDRH2
TFYRSNWYNDYAVSVKS

SEQ ID NO: 284 - protein, 17 aa, Artificial Sequence
  YKns3b2 CDRH2
TFYRSNWYNDYAVSVKS

SEQ ID NO: 285 - protein, 17 aa, Artificial Sequence
  YKns3c CDRH2
TFYRSKWYYDYAVSVKS

SEQ ID NO: 286 - protein, 16 aa, Artificial Sequence
  YKns3a1 CDRH3
DRFYGPGGDLYYGLDV

SEQ ID NO: 287 - protein, 16 aa, Artificial Sequence
  YKns3a2 CDRH3
DRFYGPGGDLYYGLDV

SEQ ID NO: 288 - protein, 16 aa, Artificial Sequence
  YKns3b1 CDRH3
DLYIGPTTDFYYGMDV

SEQ ID NO: 289 - protein, 16 aa, Artificial Sequence
  YKns3b2 CDRH3
DLYIGPTTDFYYGMDV

SEQ ID NO: 290 - protein, 16 aa, Artificial Sequence
  YKns3c CDRH3
DFYIGPTRDFYYGMDV

SEQ ID NO: 291 - protein, 12 aa, Artificial Sequence
  YKns3a1 CDRL1
RASQSVSSSYKA

SEQ ID NO: 292 - protein, 12 aa, Artificial Sequence
  YKns3a1* CDRL1
RASQSVSSSYKA

SEQ ID NO: 293 - protein, 12 aa, Artificial Sequence
  YKns3a2 CDRL1
RASQSVSSSYKA

SEQ ID NO: 294 - protein, 12 aa, Artificial Sequence
  YKns3b1 CDRL1
RASQSVSSSYKA

SEQ ID NO: 295 - protein, 12 aa, Artificial Sequence
  YKns3b2 CDRL1
RASQSVSSSYKA

SEQ ID NO: 296 - protein, 12 aa, Artificial Sequence
  YKns3c CDRL1
RASQSVSSSYKA

SEQ ID NO: 297 - protein, 7 aa, Artificial Sequence
  YKns3a1 CDRL2
GASSRAT

SEQ ID NO: 298 - protein, 7 aa, Artificial Sequence
  YKns3a1* CDRL2
GASSRAT

SEQ ID NO: 299 - protein, 7 aa, Artificial Sequence
  YKns3a2 CDRL2
GASSRAT

SEQ ID NO: 300 - protein, 7 aa, Artificial Sequence
  YKns3b1 CDRL2
GASSRAT

SEQ ID NO: 301 - protein, 7 aa, Artificial Sequence
  YKns3b2 CDRL2
GASSRAT

SEQ ID NO: 302 - protein, 7 aa, Artificial Sequence
  YKns3c CDRL2
GASSRAT

SEQ ID NO: 303 - protein, 9 aa, Artificial Sequence
  YKns3a1 CDRL3
QQYGSSPQT

SEQ ID NO: 304 - protein, 9 aa, Artificial Sequence
  YKns3a1* CDRL3
QQYGSSPQT

SEQ ID NO: 305 - protein, 9 aa, Artificial Sequence
  YKns3a2 CDRL3
QQYGSSPQT

SEQ ID NO: 306 - protein, 9 aa, Artificial Sequence
  YKns3b1 CDRL3
QQYGSSPQT

SEQ ID NO: 307 - protein, 9 aa, Artificial Sequence
  YKns3b2 CDRL3
QQYGSSPQT

SEQ ID NO: 308 - protein, 9 aa, Artificial Sequence
  YKns3c CDRL3
QQYGSSPQT

SEQ ID NO: 309 - protein, 27 aa, Artificial Sequence
  A Heavy Chain FW1
LEQSGAEVKKPGSSVKVSCKASGGTFS

SEQ ID NO: 310 - protein, 27 aa, Artificial Sequence
  B2 Heavy Chain FW1
LEQSGAEVKKPGSSVKVSCRASGSPFS

SEQ ID NO: 311 - protein, 27 aa, Artificial Sequence
  B2 Heavy Chain FW1
LEQSGAEVKKPGSSVKVSCRASGSPYS

SEQ ID NO: 312 - protein, 27 aa, Artificial Sequence
  B3 Heavy Chain FW1
LEQSGAEVKKPGSSVKVSCRASGSPYS

SEQ ID NO: 313 - protein, 27 aa, Artificial Sequence
  C1 and C1* Heavy Chain FW1
LEQSGAEVKTPGSSVRVSCRPPGGNFN

SEQ ID NO: 314 - protein, 27 aa, Artificial Sequence
  C2 and C2* Heavy Chain FW1
LEQSGAEVKKPGSSVRVSCRAPGGTFN

SEQ ID NO: 315 - protein, 27 aa, Artificial Sequence
  C3 Heavy Chain FW1
LEQSGAEVKEPGSSVRVSCRAPGGTFN

SEQ ID NO: 316 - protein, 27 aa, Artificial Sequence
  C4 Heavy Chain FW1
LEQSGAEVKKPGSSVRVSCRPPGGTFN

SEQ ID NO: 317 - protein, 27 aa, Artificial Sequence
  C5 Heavy Chain FW1
LEQSGAEVKKPGSSVRVSCRAPGGTLN

SEQ ID NO: 318 - protein, 27 aa, Artificial Sequence
  C6 Heavy Chain FW1
LEQSGAEVKKPGSSVRVSCRPPGGTFN

SEQ ID NO: 319 - protein, 26 aa, Artificial Sequence
  D1 Heavy Chain FW1
LESGGGLVQPGGSLRLSCEASGYYFS

SEQ ID NO: 320 - protein, 27 aa, Artificial Sequence
  D2 Heavy Chain FW1
LEQSGGGLVQPGGSLRLSCEASGYYFS

SEQ ID NO: 321 - protein, 26 aa, Artificial Sequence
  D3 Heavy Chain FW1
LESGGGLVQPGGSLRLSCEASGYYFS

SEQ ID NO: 322 - protein, 26 aa, Artificial Sequence
  D4 Heavy Chain FW1
LESGGGLVQPGGSLRLSCEASGYYFS

SEQ ID NO: 323 - protein, 27 aa, Artificial Sequence
  E Heavy Chain FW1
LEQSGAELKKPGSSVKVSCKPSDGTFR

SEQ ID NO: 324 - protein, 27 aa, Artificial Sequence
  F Heavy Chain FW1
LEQSGNEVKKPGASVKVSCRAYGYNFG

SEQ ID NO: 325 - protein, 27 aa, Artificial Sequence
  G Heavy Chain FW1
LEQSGAEMKKPGASLKVSCKTSGYTFD

SEQ ID NO: 326 - protein, 27 aa, Artificial Sequence
  H1, H1* and H1** Heavy Chain FW1
LEQSGAEVKKPGSSVKVSCEASGGTFD

SEQ ID NO: 327 - protein, 27 aa, Artificial Sequence
  H2 Heavy Chain FW1
LEQSGAEVKKPGSSVKVSCETSGGTFD

SEQ ID NO: 328 - protein, 27 aa, Artificial Sequence
  H3 Heavy Chain FW1
LEQSGAEVKKPGSSVKVSCETSGGTLD

SEQ ID NO: 329 - protein, 26 aa, Artificial Sequence
  I Heavy Chain FW1
LESGGGLVQPGRSLRLSCKASGFNFA

SEQ ID NO: 330 - protein, 27 aa, Artificial Sequence
  J1 Heavy Chain FW1
LEQSGPEVKKPGSSVKVSCKGSGDRFN

SEQ ID NO: 331 - protein, 27 aa, Artificial Sequence
  J2 Heavy Chain FW1
LEQSGPEVKKPGSSVKVSCKDSGDTFN

SEQ ID NO: 332 - protein, 27 aa, Artificial Sequence
  J3 and J3* Heavy Chain FW1
LEQSGPEVKKPGSSVKVSCKGSGDTFN

SEQ ID NO: 333 - protein, 27 aa, Artificial Sequence
  J4 Heavy Chain FW1
LEQSGAEVKKPGSSVRVSCEVSGDTFR

SEQ ID NO: 334 - protein, 27 aa, Artificial Sequence
  K Heavy Chain FW1
LEQSGPGLVKPGRPFSLTCAISGDSVS

SEQ ID NO: 335 - protein, 27 aa, Artificial Sequence
  L1 Heavy Chain FW1
LEQSGAEVKKPGSSVKVSCKASGDTFR

SEQ ID NO: 336 - protein, 27 aa, Artificial Sequence
  L2 Heavy Chain FW1
LEQSGAEVKMPGSSVKVSCKASGDTFR

SEQ ID NO: 337 - protein, 27 aa, Artificial Sequence
  L3 Heavy Chain FW1
LEQSGAEVKKPGSSVKVSCKASGDTFR

SEQ ID NO: 338 - protein, 27 aa, Artificial Sequence
  L4 Heavy Chain FW1
LEQSGAEVKKPGSSVKVSCKASGDTFR

SEQ ID NO: 339 - protein, 27 aa, Artificial Sequence
  M Heavy Chain FW1
LEQSGAEVKKPGASVKVSCKASGYTFT

SEQ ID NO: 340 - protein, 14 aa, Artificial Sequence
  A Heavy Chain FW2
WVRQAPGQGLEWVG

SEQ ID NO: 341 - protein, 14 aa, Artificial Sequence
  B1 Heavy Chain FW2
WVRQAPGQGLEWMG

SEQ ID NO: 342 - protein, 14 aa, Artificial Sequence
  B2 Heavy Chain FW2
WVRQAPGQGLEWMG

SEQ ID NO: 343 - protein, 14 aa, Artificial Sequence
  B3 Heavy Chain FW2
WVRQAPGQGLEWMG

SEQ ID NO: 344 - protein, 14 aa, Artificial Sequence
  C1 and C1* Heavy Chain FW2
WVRQAPGHGLEWVG

SEQ ID NO: 345 - protein, 14 aa, Artificial Sequence
  C2 and C2* Heavy Chain FW2
WVRQAPGHGLEWVG

SEQ ID NO: 346 - protein, 14 aa, Artificial Sequence
  C3 Heavy Chain FW2
WVRQAPGHGLEWVG

SEQ ID NO: 347 - protein, 14 aa, Artificial Sequence
  C4 Heavy Chain FW2
WVRQAPGHGLEWVG

SEQ ID NO: 348 - protein, 14 aa, Artificial Sequence
  C5 Heavy Chain FW2
WVRQAPGHGLEWVG

SEQ ID NO: 349 - protein, 14 aa, Artificial Sequence
  C6 Heavy Chain FW2
WVRQAPGHGLEWVG

SEQ ID NO: 350 - protein, 14 aa, Artificial Sequence
  D1 Heavy Chain FW2
WVRQTPGKGLEWVS

SEQ ID NO: 351 - protein, 14 aa, Artificial Sequence
  D2 Heavy Chain FW2
WVRQTPGKGLEWVS

SEQ ID NO: 352 - protein, 14 aa, Artificial Sequence
  D3 Heavy Chain FW2
WVRQTPGKGLEWVS

SEQ ID NO: 353 - protein, 14 aa, Artificial Sequence
  D4 Heavy Chain FW2
WVRQTPGKGLEWVS

SEQ ID NO: 354 - protein, 14 aa, Artificial Sequence
  E Heavy Chain FW2
WVRQAPGQTLEWMG

SEQ ID NO: 355 - protein, 14 aa, Artificial Sequence
  F Heavy Chain FW2
WVRQAPGQGLEWMG

SEQ ID NO: 356 - protein, 14 aa, Artificial Sequence
  G Heavy Chain FW2
WVRQAPGQGLEWMG

SEQ ID NO: 357 - protein, 14 aa, Artificial Sequence
  H1, H1* and H1** Heavy Chain FW2
WVRQAPGQGLEWIG

SEQ ID NO: 358 - protein, 14 aa, Artificial Sequence
  H2 Heavy Chain FW2
WVRQAPGQGLEWIG

SEQ ID NO: 359 - protein, 14 aa, Artificial Sequence
  H3 Heavy Chain FW2
WVRQAPGQGLEWIG

SEQ ID NO: 360 - protein, 14 aa, Artificial Sequence
  I Heavy Chain FW2
WVRQAPGKGLEWIG

SEQ ID NO: 361 - protein, 14 aa, Artificial Sequence
  J1 Heavy Chain FW2
WVRQAPGQGLEWIG

SEQ ID NO: 362 - protein, 14 aa, Artificial Sequence
  J2 Heavy Chain FW2
WVRQAPGQGLEWIG

SEQ ID NO: 363 - protein, 14 aa, Artificial Sequence
  J3 and J3* Heavy Chain FW2
WVRQAPGQGLEWIG

SEQ ID NO: 364 - protein, 14 aa, Artificial Sequence
  J4 Heavy Chain FW2
WVRQAPGQGFEWIG

SEQ ID NO: 365 - protein, 14 aa, Artificial Sequence
  K Heavy Chain FW2
WVRQSPSRGLEWLG

SEQ ID NO: 366 - protein, 14 aa, Artificial Sequence
  L1 Heavy Chain FW2
WARQAPGQGLEWMG

SEQ ID NO: 367 - protein, 14 aa, Artificial Sequence
  L2 Heavy Chain FW2
WARQAPGQGLEWMG

SEQ ID NO: 368 - protein, 14 aa, Artificial Sequence
  L3 Heavy Chain FW2
WARQAPGQGLEWMG

SEQ ID NO: 369 - protein, 14 aa, Artificial Sequence
  L4 Heavy Chain FW2
WARQAPGQGLEWMG

SEQ ID NO: 370 - protein, 14 aa, Artificial Sequence
  M Heavy Chain FW2
WVRQAPGQGLEWMG

SEQ ID NO: 371 - protein, 32 aa, Artificial Sequence
  A Heavy Chain FW3
RVTMTADESMTTVYMELSSLRSEDTAMYYCAR

SEQ ID NO: 372 - protein, 32 aa, Artificial Sequence
  B1 Heavy Chain FW3
RVTITADRSTTTAYMEMSSLTSDDTAIYYCAR

SEQ ID NO: 373 - protein, 32 aa, Artificial Sequence
  B2 Heavy Chain FW3
RVTITADRATATAYMEMSSLTSDDTAIYYCAR

SEQ ID NO: 374 - protein, 32 aa, Artificial Sequence; identical to SEQ ID NO: 373
  B3 Heavy Chain FW3

SEQ ID NO: 375 - protein, 32 aa, Artificial Sequence
  C1 and C1* Heavy Chain FW3
RVTITADGSSGTAYMDLNSLRSDDTAFYYCVR

SEQ ID NO: 376 - protein, 32 aa, Artificial Sequence
  C2 and C2* Heavy Chain FW3
RVTITADGSSGTAYMELNSLRSDDTAVYYCVR

SEQ ID NO: 377 - protein, 32 aa, Artificial Sequence; identical to SEQ ID NO: 376
  C3 Heavy Chain FW3

SEQ ID NO: 378 - protein, 32 aa, Artificial Sequence; identical to SEQ ID NO: 376
  C4 Heavy Chain FW3

SEQ ID NO: 379 - protein, 32 aa, Artificial Sequence; identical to SEQ ID NO: 376
  C5 Heavy Chain FW3

SEQ ID NO: 380 - protein, 32 aa, Artificial Sequence; identical to SEQ ID NO: 376
  C6 Heavy Chain FW3

SEQ ID NO: 381 - protein, 32 aa, Artificial Sequence
  D1 Heavy Chain FW3
RFTISRDNSKNTVFLHMNNLRPEDTAVYYCAK

SEQ ID NO: 382 - protein, 32 aa, Artificial Sequence; identical to SEQ ID NO: 381
  D2 Heavy Chain FW3

SEQ ID NO: 383 - protein, 32 aa, Artificial Sequence
  D3 Heavy Chain FW3
RFTISRDNSKNTMFLHMNNLRPEDTAVYYCAK

SEQ ID NO: 384 - protein, 32 aa, Artificial Sequence
  D4 Heavy Chain FW3
RFTISRDNSKNTVFLHMSNLRPEDTAVYYCAK

SEQ ID NO: 385 - protein, 32 aa, Artificial Sequence
  E Heavy Chain FW3
RVTISADMSTATAYMELSSLRSDDTAIYYCAK

SEQ ID NO: 386 - protein, 32 aa, Artificial Sequence
  F Heavy Chain FW3
RFTMTTDTSTRTGYMELRNLRSDDTAVYYCAR

SEQ ID NO: 387 - protein, 32 aa, Artificial Sequence
  G Heavy Chain FW3
RVTMTTDPSTRTAYMELRSLRSDDTAVYFCAR

SEQ ID NO: 388 - protein, 32 aa, Artificial Sequence
  H1, H1* and H1** Heavy Chain FW3
RVTISDDKSTGTGHMELRSLRSEDTAVYYCVR

SEQ ID NO: 389 - protein, 32 aa, Artificial Sequence; identical to SEQ ID NO: 388
  H2 Heavy Chain FW3

SEQ ID NO: 390 - protein, 32 aa, Artificial Sequence; identical to SEQ ID NO: 388
  H3 Heavy Chain FW3

SEQ ID NO: 391 - protein, 32 aa, Artificial Sequence
  I Heavy Chain FW3
RFTISRDDSKSTAYLQINGLKTEDTAVYYCAR

SEQ ID NO: 392 - protein, 32 aa, Artificial Sequence
  J1 Heavy Chain FW3
RVVISADASTDTAYMELSSLRSEDTAVYYCAK

SEQ ID NO: 393 - protein, 32 aa, Artificial Sequence
  J2 Heavy Chain FW3
RVIISADASTATAYLELSSLRSEDTAVYYCAK

SEQ ID NO: 394 - protein, 32 aa, Artificial Sequence
  J3 and J3* Heavy Chain FW3
RVTISADASALTTYMELSSLRPEDTAVYYCAK

SEQ ID NO: 395 - protein, 32 aa, Artificial Sequence
  J4 Heavy Chain FW3
RITISADQSTNTVYMELSSLRSDDTAVYYCAK

SEQ ID NO: 396 - protein, 32 aa, Artificial Sequence
  K Heavy Chain FW3
RITINSDTSKNQFSLHLNSVTPEDTAVYYCVR

SEQ ID NO: 397 - protein, 32 aa, Artificial Sequence
  L1 Heavy Chain FW3
RVTITADESTQTVYMDLSSLRSDDTAVYYCAK

SEQ ID NO: 398 - protein, 32 aa, Artificial Sequence
  L2 Heavy Chain FW3
RVTITADESTKTVYMDLSSLRSDDTAVYYCAK

SEQ ID NO: 399 - protein, 32 aa, Artificial Sequence
  L3 Heavy Chain FW3
RVTITADESTKTVYMDLSSLTSDDTAVYYCAK

SEQ ID NO: 400 - protein, 32 aa, Artificial Sequence; identical to SEQ ID NO: 398
  L4 Heavy Chain FW3

SEQ ID NO: 401 - protein, 32 aa, Artificial Sequence
  M Heavy Chain FW3
RVTMTTDTSTSTAYMELTSLTSEDTAVYYCAR

SEQ ID NO: 402 - protein, 13 aa, Artificial Sequence
  A Heavy Chain FW4
WGQGTMVTVSSAS

SEQ ID NO: 403 - protein, 13 aa, Artificial Sequence
  B1 Heavy Chain FW4
WGQGTLVIVSSAS

SEQ ID NO: 404 - protein, 13 aa, Artificial Sequence
  B2 Heavy Chain FW4
WGQGTPVIVSSAS

SEQ ID NO: 405 - protein, 13 aa, Artificial Sequence
  B3 Heavy Chain FW4
WGQGTPVIVSSAS

SEQ ID NO: 406 - protein, 13 aa, Artificial Sequence
  C1 and C1* Heavy Chain FW4
WGQGTLVTVSSAS

SEQ ID NO: 407 - protein, 13 aa, Artificial Sequence
  C2 and C2* Heavy Chain FW4
WGQGTLVTVSSAS

SEQ ID NO: 408 - protein, 13 aa, Artificial Sequence
  C3 Heavy Chain FW4
WGQGTLVTVSSAS

SEQ ID NO: 409 - protein, 13 aa, Artificial Sequence
  C4 Heavy Chain FW4
WGQGTLVTVSSAS

SEQ ID NO: 410 - protein, 13 aa, Artificial Sequence
  C5 Heavy Chain FW4
WGQGTLVTVSSAS

SEQ ID NO: 411 - protein, 13 aa, Artificial Sequence
  C6 Heavy Chain FW4
WGQGTLVTVSSAS

SEQ ID NO: 412 - protein, 13 aa, Artificial Sequence
  D1 Heavy Chain FW4
WGQGTLVTVSSAS

SEQ ID NO: 413 - protein, 13 aa, Artificial Sequence
  D2 Heavy Chain FW4
WGQGTLVTVSSAS

SEQ ID NO: 414 - protein, 13 aa, Artificial Sequence
  D3 Heavy Chain FW4
WGQGTLVTVSSAS

SEQ ID NO: 415 - protein, 13 aa, Artificial Sequence
  D4 Heavy Chain FW4
WGQGTLVTVSSAS

SEQ ID NO: 416 - protein, 13 aa, Artificial Sequence
  E Heavy Chain FW4
WGQGTLVTVSSAS

SEQ ID NO: 417 - protein, 13 aa, Artificial Sequence
  F Heavy Chain FW4
WGQGTLVIVSSDE

SEQ ID NO: 418 - protein, 13 aa, Artificial Sequence
  G Heavy Chain FW4
WGQGTTVTVSSAS

SEQ ID NO: 419 - protein, 13 aa, Artificial Sequence
  H1, H1* and H1** Heavy Chain FW4
WGQGTLVTVSSAS

SEQ ID NO: 420 - protein, 13 aa, Artificial Sequence
  H2 Heavy Chain FW4
WGQGTLVTVSSAS

SEQ ID NO: 421 - protein, 13 aa, Artificial Sequence
  H3 Heavy Chain FW4
WGQGTLVTVSSAS

SEQ ID NO: 422 - protein, 13 aa, Artificial Sequence
  I Heavy Chain FW4
WGQGTLVTVSSAS

SEQ ID NO: 423 - protein, 13 aa, Artificial Sequence
  J1 Heavy Chain FW4
WGQGTLVTVSAAS

SEQ ID NO: 424 - protein, 13 aa, Artificial Sequence
  J2 Heavy Chain FW4
WGQGTQVTVSSAS

SEQ ID NO: 425 - protein, 13 aa, Artificial Sequence
  J3 and J3* Heavy Chain FW4
WGQGTLITVSSAS

SEQ ID NO: 426 - protein, 13 aa, Artificial Sequence
  J4 Heavy Chain FW4
WGQGTLVTVSSAS

SEQ ID NO: 427 - protein, 13 aa, Artificial Sequence
  K Heavy Chain FW4
WGQGTTVTVSSAS

SEQ ID NO: 428 - protein, 13 aa, Artificial Sequence
  L1 Heavy Chain FW4
WGQGTLVTVSSAS

SEQ ID NO: 429 - protein, 13 aa, Artificial Sequence
  L2 Heavy Chain FW4
WGQGTLVTVSSAS

SEQ ID NO: 430 - protein, 13 aa, Artificial Sequence
  L3 Heavy Chain FW4
WGQGTLVTVSSAS

SEQ ID NO: 431 - protein, 13 aa, Artificial Sequence
  L4 Heavy Chain FW4
WGQGTLVTVSSAS

SEQ ID NO: 432 - protein, 13 aa, Artificial Sequence
  M Heavy Chain FW4
WGQGTLVTISSAS

SEQ ID NO: 433 - protein, 21 aa, Artificial Sequence
  A Light Chain FW1
ELTQSPATLSVSPGESATLSC

SEQ ID NO: 434 - protein, 23 aa, Artificial Sequence
  B1 Light Chain FW1
ELTLTQSPGTLSLSPGERATLSC

SEQ ID NO: 435 - protein, 21 aa, Artificial Sequence
  B2 Light Chain FW1
TLTQSPDSLAVSLGERATINC

SEQ ID NO: 436 - protein, 23 aa, Artificial Sequence
  B3 Light Chain FW1
ELVMTQSPGTLSLSPGERATLSC

SEQ ID NO: 437 - protein, 23 aa, Artificial Sequence
  C1 Light Chain FW1
ELTLTQSPGTLSLSPGKRATLSC

SEQ ID NO: 438 - protein, 21 aa, Artificial Sequence
  C1* Light Chain FW1
ELTQSPSTLSLSPGEGATLSC

SEQ ID NO: 439 - protein, 21 aa, Artificial Sequence
  C2 Light Chain FW1
ELTQSPGTLSLSPGERAALSC

SEQ ID NO: 440 - protein, 21 aa, Artificial Sequence
  C2* Light Chain FW1
ELTQSPGTLSLSPGERATLSC

SEQ ID NO: 441 - protein, 21 aa, Artificial Sequence
  C3 Light Chain FW1
ELTQSPGTLSLSPGERATLSC

SEQ ID NO: 442 - protein, 21 aa, Artificial Sequence
  C4 Light Chain FW1
ELTQSPGTLSLSPGERATLSC

SEQ ID NO: 443 - protein, 21 aa, Artificial Sequence
  C5 Light Chain FW1
ELTQSPATLYVSPGERATLSC

SEQ ID NO: 444 - protein, 21 aa, Artificial Sequence
  C6 Light Chain FW1
ELTQSPATLSVSPGESATLSC

SEQ ID NO: 445 - protein, 21 aa, Artificial Sequence
  D1 Light Chain FW1
ELTQSPGTLSLSPGERATLSC

SEQ ID NO: 446 - protein, 21 aa, Artificial Sequence
  D2 Light Chain FW1
ELTQSPATLSVSPGERATLSC

SEQ ID NO: 447 - protein, 23 aa, Artificial Sequence
  D3 Light Chain FW1
ELTLTQSPGTLSLSPGERATLSC

SEQ ID NO: 448 - protein, 23 aa, Artificial Sequence
  D4 Light Chain FW1
ELVMTQSPGTLSLSPGERATLSC

SEQ ID NO: 449 - protein, 23 aa, Artificial Sequence
  E Light Chain FW1
ELVLTQSPLSLPVTLGQPASISC

SEQ ID NO: 450 - protein, 23 aa, Artificial Sequence
  F Light Chain FW1
ELQMTQSPSFLSASVGDRVTITC

SEQ ID NO: 451 - protein, 21 aa, Artificial Sequence
  G Light Chain FW1
ELTQSPVSLPVTPGEPASISC

SEQ ID NO: 452 - protein, 23 aa, Artificial Sequence
  H1 Light Chain FW1
ELTLTQSPGTLSLSPGERATLSC

SEQ ID NO: 453 - protein, 21 aa, Artificial Sequence
  H1* Light Chain FW1
ELTQSPATLSVSPGERATLSC

SEQ ID NO: 454 - protein, 23 aa, Artificial Sequence
  H1** Light Chain FW1
ELTLTQSPGTLSLSPGERATLSC

SEQ ID NO: 455 - protein, 23 aa, Artificial Sequence
  H2 Light Chain FW1
ELTLTQSPGTLSLSPGERGTLSC

SEQ ID NO: 456 - protein, 21 aa, Artificial Sequence
  H3 Light Chain FW1
ELTQSPATLSVSPGERATLSC

SEQ ID NO: 457 - protein, 23 aa, Artificial Sequence
  I Light Chain FW1
ELTLTQSPATLSVSPGERATLFC

SEQ ID NO: 458 - protein, 23 aa, Artificial Sequence
  J1 Light Chain FW1
ELVLTQSPGTLSLSPGERATLSC

SEQ ID NO: 459 - protein, 21 aa, Artificial Sequence
  J2 Light Chain FW1
ELTQSPGTLSLSPGERATLSC

SEQ ID NO: 460 - protein, 21 aa, Artificial Sequence
  J3 Light Chain FW1
ELTQSPGTLSLSPGERATLSC

SEQ ID NO: 461 - protein, 23 aa, Artificial Sequence
  J3* Light Chain FW1
EFTLTQSPGTLSLSPGERGTLSC

SEQ ID NO: 462 - protein, 23 aa, Artificial Sequence
  J4 Light Chain FW1
ELTLTQSPGTLSLSPGERATLSC

SEQ ID NO: 463 - protein, 21 aa, Artificial Sequence
  K Light Chain FW1
ELTQSPGTLSLSPGERATLSC

SEQ ID NO: 464 - protein, 21 aa, Artificial Sequence
  L1 and L2 Light Chain FW1
ELTQSPGTLSLSPGERATLSC

SEQ ID NO: 465 - protein, 23 aa, Artificial Sequence
  L3 Light Chain FW1
ELVMTQSPATLSLSPGERATLSC

SEQ ID NO: 466 - protein, 21 aa, Artificial Sequence
  L4 Light Chain FW1
ELTQSPGTLSLSPGERATLSC

SEQ ID NO: 467 - protein, 23 aa, Artificial Sequence
  M Light Chain FW1
ELTLTQSPGTLSLSPGERATLSC

SEQ ID NO: 468 - protein, 15 aa, Artificial Sequence
  A Light Chain FW2
WYQQKPGQAPRLLIY

SEQ ID NO: 469 - protein, 15 aa, Artificial Sequence
  B1 Light Chain FW2
WYQQKPGQAPRLLIY

SEQ ID NO: 470 - protein, 15 aa, Artificial Sequence
  B2 Light Chain FW2
WYQQKPGQPPQLLIY

SEQ ID NO: 471 - protein, 15 aa, Artificial Sequence
  B3 Light Chain FW2
WYQQKPGQAPRLLVY

SEQ ID NO: 472 - protein, 15 aa, Artificial Sequence
  C1 Light Chain FW2
WYQQKPGQAPRLLIY

SEQ ID NO: 473 - protein, 15 aa, Artificial Sequence
  C1* Light Chain FW2
WYQQKPGQAPRLLIY

SEQ ID NO: 474 - protein, 15 aa, Artificial Sequence
  C2 Light Chain FW2
WYQQKPGQAPRLLIY

SEQ ID NO: 475 - protein, 15 aa, Artificial Sequence
  C2* Light Chain FW2
WYQQKPGQAPRLLIY

SEQ ID NO: 476 - protein, 15 aa, Artificial Sequence
  C3 Light Chain FW2
WYQQKPGQAPRLLIY

SEQ ID NO: 477 - protein, 15 aa, Artificial Sequence
  C4 Light Chain FW2
WYQQKPGQAPRLLIY

SEQ ID NO: 478 - protein, 15 aa, Artificial Sequence
  C5 Light Chain FW2
WYQQKPGQTPRLLIY

SEQ ID NO: 479 - protein, 15 aa, Artificial Sequence
  C6 Light Chain FW2
WYQQKPGQAPRLLIY

SEQ ID NO: 480 - protein, 15 aa, Artificial Sequence
  D1 Light Chain FW2
WYQQKPGQAPRLLIY

SEQ ID NO: 481 - protein, 15 aa, Artificial Sequence
  D2 Light Chain FW2
WYQQKPGQAPRLLIY

SEQ ID NO: 482 - protein, 15 aa, Artificial Sequence
  D3 Light Chain FW2
WYQQKPGQAPRLLIY

SEQ ID NO: 483 - protein, 15 aa, Artificial Sequence
  D4 Light Chain FW2
WYQQKPGQAPRLLIY

SEQ ID NO: 484 - protein, 15 aa, Artificial Sequence
  E Light Chain FW2
WFHQRAGQPPRRLIY

SEQ ID NO: 485 - protein, 15 aa, Artificial Sequence
  F Light Chain FW2
WYQQKPGKAPKLLIS

SEQ ID NO: 486 - protein, 15 aa, Artificial Sequence
  G Light Chain FW2
WYLQKPGQSPQLLMY

SEQ ID NO: 487 - protein, 15 aa, Artificial Sequence
  H1 Light Chain FW2
WYQQKPGQAPRLLIY

SEQ ID NO: 488 - protein, 15 aa, Artificial Sequence
  H1* Light Chain FW2
WYQQKPGQAPRLLIY

SEQ ID NO: 489 - protein, 15 aa, Artificial Sequence
  H1** Light Chain FW2
WYQQKPGQAPRLLIY

SEQ ID NO: 490 - protein, 15 aa, Artificial Sequence
  H2 Light Chain FW2
WYQQKPGQAPRLLIY

SEQ ID NO: 491 - protein, 15 aa, Artificial Sequence
  H3 Light Chain FW2
WYQQKPGQAPRLLIY

SEQ ID NO: 492 - protein, 15 aa, Artificial Sequence
  I Light Chain FW2
WYQQKPGQAPRLLIY

SEQ ID NO: 493 - protein, 15 aa, Artificial Sequence
  J1 Light Chain FW2
WYQQKPGQAPRLLIY

SEQ ID NO: 494 - protein, 15 aa, Artificial Sequence
  J2 Light Chain FW2
WYQQKPGQAPRLLIY

SEQ ID NO: 495 - protein, 15 aa, Artificial Sequence
  J3 Light Chain FW2
WYQQKPGQAPRLLIY

SEQ ID NO: 496 - protein, 15 aa, Artificial Sequence
  J3* Light Chain FW2
WYQQKPGQAPRLLIY

SEQ ID NO: 497 - protein, 15 aa, Artificial Sequence
  J4 Light Chain FW2
WYQQKPGQAPRLLIY

SEQ ID NO: 498 - protein, 15 aa, Artificial Sequence
  K Light Chain FW2
WYQQKPGLAPRLLIY

SEQ ID NO: 499 - protein, 15 aa, Artificial Sequence
  L1 and L2 Light Chain FW2
WYQQKPGQAPRLLIY

SEQ ID NO: 500 - protein, 15 aa, Artificial Sequence
  L3 Light Chain FW2
WYQQKPGQAPRLLIY

SEQ ID NO: 501 - protein, 15 aa, Artificial Sequence
  L4 Light Chain FW2
WYQHKPGQAPRLLIY

SEQ ID NO: 502 - protein, 15 aa, Artificial Sequence
  M Light Chain FW2
WYQQKPGQAPRLLIY

SEQ ID NO: 503 - protein, 32 aa, Artificial Sequence
  A Light Chain FW3
AIPGRFSGSGSGTDFTLTISRLEPEDLAVYHC

SEQ ID NO: 504 - protein, 32 aa, Artificial Sequence
  B1 Light Chain FW3
GIPDRFSGSGSGTDFTLTISRLEPEDFAVYYC

SEQ ID NO: 505 - protein, 32 aa, Artificial Sequence
  B2 Light Chain FW3
GVPDRFSGSGSGTDFTLTISSLQAEDVAVYFC

SEQ ID NO: 506 - protein, 32 aa, Artificial Sequence
  B3 Light Chain FW3
GIPDRFSGSGSGTDFTLTISRLQPEDFAVYYC

SEQ ID NO: 507 - protein, 32 aa, Artificial Sequence
  C1 Light Chain FW3
GIPHRFSGSGSGTDFTLTISRLEPEDFAVYYC

SEQ ID NO: 508 - protein, 32 aa, Artificial Sequence
  C1* Light Chain FW3
GIPDRFSGSGSGTNFTLTISRLEPEDFAVYFC

SEQ ID NO: 509 - protein, 32 aa, Artificial Sequence
  C2 Light Chain FW3
GIPDRFSGTGSGTDFSLTISRLEPEDSAVYYC

SEQ ID NO: 510 - protein, 32 aa, Artificial Sequence; identical to SEQ ID NO: 504
  C2* Light Chain FW3

SEQ ID NO: 511 - protein, 32 aa, Artificial Sequence
  C3 Light Chain FW3
GIPDRFSGSGSGTDFTLTISGLEPEDFAVYYC

SEQ ID NO: 512 - protein, 32 aa, Artificial Sequence; identical to SEQ ID NO: 504
  C4 Light Chain FW3

SEQ ID NO: 513 - protein, 32 aa, Artificial Sequence; identical to SEQ ID NO: 504
  C5 Light Chain FW3

SEQ ID NO: 514 - protein, 32 aa, Artificial Sequence
  C6 Light Chain FW3
GIPARFSGSGSGTDFTLTISRLEPEDFAVYYC

SEQ ID NO: 515 - protein, 32 aa, Artificial Sequence; identical to SEQ ID NO: 504
  D1 Light Chain FW3

SEQ ID NO: 516 - protein, 32 aa, Artificial Sequence; identical to SEQ ID NO: 504
  D2 Light Chain FW3

SEQ ID NO: 517 - protein, 32 aa, Artificial Sequence; identical to SEQ ID NO: 504
  D3 Light Chain FW3

SEQ ID NO: 518 - protein, 32 aa, Artificial Sequence
  D4 Light Chain FW3
GIPDRFSGSGSGTDFTLTITRLEPEDFAVYYC

SEQ ID NO: 519 - protein, 32 aa, Artificial Sequence
  E Light Chain FW3
GVPERFSGSGSGTDFTLKISRVEAEDVGIYYC

SEQ ID NO: 520 - protein, 32 aa, Artificial Sequence
  F Light Chain FW3
GVSSRFSGSGSGTGFTLTISSLQSEDSATYYC

SEQ ID NO: 521 - protein, 32 aa, Artificial Sequence
  G Light Chain FW3
GVPDRFSGSGSGTDFTLKISRVEAEDVGVYYC

SEQ ID NO: 522 - protein, 32 aa, Artificial Sequence; identical to SEQ ID NO: 504
  H1 Light Chain FW3

SEQ ID NO: 523 - protein, 32 aa, Artificial Sequence; identical to SEQ ID NO: 504
  H1* Light Chain FW3

SEQ ID NO: 524 - protein, 32 aa, Artificial Sequence
  H1** Light Chain FW3
GIPDRFSGSGSGTDFTLTISRLEPEDLGVYYC

SEQ ID NO: 525 - protein, 32 aa, Artificial Sequence; identical to SEQ ID NO: 504
  H2 Light Chain FW3

SEQ ID NO: 526 - protein, 32 aa, Artificial Sequence
  H3 Light Chain FW3
GIPARFSGSGSGTDFTLTVSRLEPEDSAVYFC

SEQ ID NO: 527 - protein, 32 aa, Artificial Sequence
  I Light Chain FW3
TTPTRFSGSGSGTDFTLTISRLQSEDFAVYYC

SEQ ID NO: 528 - protein, 32 aa, Artificial Sequence
  J1 Light Chain FW3
GIPDRFSGSGSGTDFALTITRLEPEDFAVYYC

SEQ ID NO: 529 - protein, 32 aa, Artificial Sequence; identical to SEQ ID NO: 504
  J2 Light Chain FW3

SEQ ID NO: 530 - protein, 32 aa, Artificial Sequence; identical to SEQ ID NO: 511
  J3 Light Chain FW3

SEQ ID NO: 531 - protein, 32 aa, Artificial Sequence; identical to SEQ ID NO: 504
  J3* Light Chain FW3

SEQ ID NO: 532 - protein, 32 aa, Artificial Sequence; identical to SEQ ID NO: 504
  J4 Light Chain FW3

SEQ ID NO: 533 - protein, 32 aa, Artificial Sequence
  K Light Chain FW3
GIPDRFSGSGSGTGFTLTISTLEPEDFAIYYC

SEQ ID NO: 534 - protein, 32 aa, Artificial Sequence; identical to SEQ ID NO: 504
  L1 and L2 Light Chain FW3

SEQ ID NO: 535 - protein, 32 aa, Artificial Sequence
  L3 Light Chain FW3
GIPARFSGSGSGTDFTLTISSLEPEDFAVYFC

SEQ ID NO: 536 - protein, 32 aa, Artificial Sequence; identical to SEQ ID NO: 504
  L4 Light Chain FW3

SEQ ID NO: 537 - protein, 32 aa, Artificial Sequence
  M Light Chain FW3
GIPDRFSGSGSGTDFTLTISRLEPEDFAVYFC

SEQ ID NO: 538 - protein, 36 aa, Artificial Sequence
  A Light Chain FW4
FGQGTKVEIKRTVAAPSVFIFPPSDEQLKSGTASVV

SEQ ID NO: 539 - protein, 36 aa, Artificial Sequence; identical to SEQ ID NO: 538
  B1 Light Chain FW4

SEQ ID NO: 540 - protein, 36 aa, Artificial Sequence
  B2 Light Chain FW4
FGPGTKVEIKRTVAAPSVFIFPPSDEQLKSGTASVV

SEQ ID NO: 541 - protein, 36 aa, Artificial Sequence
  B3 Light Chain FW4
FGQGTRVDIKRTVAAPSVSIFPPSDEQLKSGTASVV

SEQ ID NO: 542 - protein, 35 aa, Artificial Sequence
  C1 Light Chain FW4
FGQGTRVDIKRTVAAPSVFIFPPSDEQLKSGTASV

SEQ ID NO: 543 - protein, 23 aa, Artificial Sequence
  C1* Light Chain FW4
FGQGTKLEIKRTVAAPSVFIFPP

SEQ ID NO: 544 - protein, 24 aa, Artificial Sequence
  C2 Light Chain FW4
FGPGTKVDIKRTVAAPSVFIFPPS

SEQ ID NO: 545 - protein, 36 aa, Artificial Sequence; identical to SEQ ID NO: 538
  C2* Light Chain FW4

SEQ ID NO: 546 - protein, 25 aa, Artificial Sequence
  C3 Light Chain FW4
FGGGTKVEIKRTVAAPSVFIFPPSD

SEQ ID NO: 547 - protein, 36 aa, Artificial Sequence
  C4 Light Chain FW4
FGQGTRVEIKRTVAAPSVFIFPPSDEQLKSGTASVV

SEQ ID NO: 548 - protein, 36 aa, Artificial Sequence; identical to SEQ ID NO: 538
  C5 Light Chain FW4

SEQ ID NO: 549 - protein, 36 aa, Artificial Sequence
  C6 Light Chain FW4
FGQGTKLEIKRTVAAPSVFIFPPSDEQLKSGTASVV

SEQ ID NO: 550 - protein, 36 aa, Artificial Sequence; identical to SEQ ID NO: 538
  D1 Light Chain FW4

SEQ ID NO: 551 - protein, 36 aa, Artificial Sequence; identical to SEQ ID NO: 538
  D2 Light Chain FW4

SEQ ID NO: 552 - protein, 36 aa, Artificial Sequence; identical to SEQ ID NO: 538
  D3 Light Chain FW4

SEQ ID NO: 553 - protein, 36 aa, Artificial Sequence
  D4 Light Chain FW4
FGQGTKVQIKRTVAAPSVFIFPPSDEQLKSGTASVV

SEQ ID NO: 554 - protein, 33 aa, Artificial Sequence
  E Light Chain FW4
FGGGTKVEINRTVAAPSVFIFPPSDEQLKSGTA

SEQ ID NO: 555 - protein, 25 aa, Artificial Sequence
  F Light Chain FW4
FGQGTKLEIKRTVAAPSVFIFPPSD

SEQ ID NO: 556 - protein, 25 aa, Artificial Sequence
  G Light Chain FW4
FGQGTKVEIKRTVAAPSVFIFPPSD

SEQ ID NO: 557 - protein, 25 aa, Artificial Sequence
  H1 Light Chain FW4
FGGGTKVEIKRTVAAPSVFIFPPSD

SEQ ID NO: 558 - protein, 27 aa, Artificial Sequence
  H1* Light Chain FW4
FGQGTEVEIKRTVAAPSVFIFPPSDEQ

SEQ ID NO: 559 - protein, 36 aa, Artificial Sequence; identical to SEQ ID NO: 549
  H1** Light Chain FW4

SEQ ID NO: 560 - protein, 36 aa, Artificial Sequence; identical to SEQ ID NO: 538
  H2 Light Chain FW4

SEQ ID NO: 561 - protein, 36 aa, Artificial Sequence
  H3 Light Chain FW4
FGGGTKVEIKRTVAAPSVFIFPPSDEQLKSGTASVV

SEQ ID NO: 562 - protein, 24 aa, Artificial Sequence
  I Light Chain FW4
FGQGTKLEIKRTVAAPSVFVFPPS

SEQ ID NO: 563 - protein, 36 aa, Artificial Sequence; identical to SEQ ID NO: 538
  J1 Light Chain FW4

SEQ ID NO: 564 - protein, 36 aa, Artificial Sequence; identical to SEQ ID NO: 538
  J2 Light Chain FW4

SEQ ID NO: 565 - protein, 36 aa, Artificial Sequence; identical to SEQ ID NO: 538
  J3 Light Chain FW4

SEQ ID NO: 566 - protein, 36 aa, Artificial Sequence; identical to SEQ ID NO: 538
  J3* Light Chain FW4

SEQ ID NO: 567 - protein, 36 aa, Artificial Sequence
  J4 Light Chain FW4
FGQGTEVEIKRTVAAPSVFIFPPSDEQLKSGTASVV

SEQ ID NO: 568 - protein, 36 aa, Artificial Sequence
  K Light Chain FW4
FGPGTKVDIRRTVAAPSVFIFPPSDEQLKSGTASVV

SEQ ID NO: 569 - protein, 36 aa, Artificial Sequence; identical to SEQ ID NO: 540
  L1 and L2 Light Chain FW4

SEQ ID NO: 570 - protein, 36 aa, Artificial Sequence; identical to SEQ ID NO: 538
  L3 Light Chain FW4

SEQ ID NO: 571 - protein, 36 aa, Artificial Sequence
  L4 Light Chain FW4
FGQGTRLEIKRTVAAPSVFIFPPSDEQLKSGTASVV

SEQ ID NO: 572 - protein, 36 aa, Artificial Sequence; identical to SEQ ID NO: 538
  M Light Chain FW4

SEQ ID NO: 573 - protein, 26 aa, Artificial Sequence
  YKns3a1 Heavy Chain FW1
LLESGPGLVKPSQTLSLTCDISGDSV

SEQ ID NO: 574 - protein, 26 aa, Artificial Sequence
  YKns3a2 Heavy Chain FW1
LLESGPGLVKPSQTLSLTCDISGDSV

SEQ ID NO: 575 - protein, 26 aa, Artificial Sequence
  YKns3b1 Heavy Chain FW1
LLESGPGLVKPSQTLSLTCDISGDSV

SEQ ID NO: 576 - protein, 26 aa, Artificial Sequence
  YKns3b2 Heavy Chain FW1
LLESGPGLVRPSQTLSLTCDISGDSV

SEQ ID NO: 577 - protein, 26 aa, Artificial Sequence
  YKns3c Heavy Chain FW1
LLESGPGLVKPSQTLSLTCAISGDSV

SEQ ID NO: 578 - protein, 14 aa, Artificial Sequence
  YKns3a1 Heavy Chain FW2
WIRQSPRGLEWLGR

SEQ ID NO: 579 - protein, 14 aa, Artificial Sequence
  YKns3a2 Heavy Chain FW2
WIRQSPRGLEWLGR

SEQ ID NO: 580 - protein, 14 aa, Artificial Sequence
  YKns3b1 Heavy Chain FW2
WIRQSPRGLEWLGR

SEQ ID NO: 581 - protein, 14 aa, Artificial Sequence
  YKns3b2 Heavy Chain FW2
WIRQSPRGLEWLGR

SEQ ID NO: 582 - protein, 14 aa, Artificial Sequence
  YKns3c Heavy Chain FW2
WIRQSPRGLEWLGR

SEQ ID NO: 583 - protein, 32 aa, Artificial Sequence
  YKns3a1 Heavy Chain FW3
RIIISADTSKNQFSLQLNSVTPEDTAVYYCAR

SEQ ID NO: 584 - protein, 32 aa, Artificial Sequence
  YKns3a2 Heavy Chain FW3
RIIISADTSKNQLSLQLNSVTPEDTAVYYCAR

SEQ ID NO: 585 - protein, 32 aa, Artificial Sequence
  YKns3b1 Heavy Chain FW3
RITINPDTSKNQFSLQLNSVTPEDTAVYYCAR

SEQ ID NO: 586 - protein, 32 aa, Artificial Sequence; identical to SEQ ID NO: 585
  YKns3b2 Heavy Chain FW3

SEQ ID NO: 587 - protein, 32 aa, Artificial Sequence
  YKns3c Heavy Chain FW3
RITINQDTSKNQFSLHLNSVTPEDTAVYYCVR

SEQ ID NO: 588 - protein, 13 aa, Artificial Sequence
  YKns3a1 Heavy Chain FW4
WGQGTTVTVSSAS

SEQ ID NO: 589 - protein, 13 aa, Artificial Sequence
  YKns3a2 Heavy Chain FW4
WGQGTTVTVSSAS

SEQ ID NO: 590 - protein, 13 aa, Artificial Sequence
  YKns3b1 Heavy Chain FW4
WGQGTTVTVSSAS

SEQ ID NO: 591 - protein, 13 aa, Artificial Sequence
  YKns3b2 Heavy Chain FW4
WGQGTTVTVSSAS

SEQ ID NO: 592 - protein, 13 aa, Artificial Sequence
  YKns3c Heavy Chain FW4
WGQGTTVTVSSAS

SEQ ID NO: 593 - protein, 21 aa, Artificial Sequence
  YKns3a1 Light Chain FW1
ELTQSPGTLSLSPGERATLSC

SEQ ID NO: 594 - protein, 21 aa, Artificial Sequence
  YKns3a1* Light Chain FW1
ELTQSPGTLSLSPGERGTLSC

SEQ ID NO: 595 - protein, 21 aa, Artificial Sequence
  YKns3a2 Light Chain FW1
ELTQSPGTLSLSPGERATLSC

SEQ ID NO: 596 - protein, 23 aa, Artificial Sequence
  YKns3b1 Light Chain FW1
ELTLTQSPGTLSLSPGERATLSC

SEQ ID NO: 597 - protein, 21 aa, Artificial Sequence
  YKns3b2  Light Chain FW1
ELTQSPGTLSLSPGERATLSC

SEQ ID NO: 598 - protein, 21 aa, Artificial Sequence
  YKns3c  Light Chain FW1
ELTQSPGTLSLSPGERATLSC

SEQ ID NO: 599 - protein, 15 aa, Artificial Sequence
  YKns3a1 Light Chain FW2
WYQQKPGQAPRLLIY

SEQ ID NO: 600 - protein, 15 aa, Artificial Sequence
  YKns3a1* Light Chain FW2
WYQQKPGQAPRLLIY

SEQ ID NO: 601 - protein, 15 aa, Artificial Sequence
  YKns3a2 Light Chain FW2
WYQQKPGQAPRLLIY

SEQ ID NO: 602 - protein, 15 aa, Artificial Sequence
  YKns3b1 Light Chain FW2
WYQQKPGQAPRLLIY

SEQ ID NO: 603 - protein, 15 aa, Artificial Sequence
  YKns3b2 Light Chain FW2
WYQQKPGQAPRLLIY

SEQ ID NO: 604 - protein, 15 aa, Artificial Sequence
  YKns3c Light Chain FW2
WYQQKPGQAPRLLIY

SEQ ID NO: 605 - protein, 29 aa, Artificial Sequence
  YKns3 Light Chain FW3
GIPDRFSGSGSGTDFTLTISRLEPEDFAV

SEQ ID NO: 606 - protein, 27 aa, Artificial Sequence
  YKns3 Light Chain FW4
FGQGTKVEIKRTVAAPSVFIFPPSDEQ

SEQ ID NO: 607 - protein, 3011 aa, Artificial Sequence
  AAB66324 HCV subtype 1a H77 (AF009606)
MSTNPKPQRKTKRNTNRRPQDVKFPGGGQIVGGVYLLPRRGPRLGVRATRKTSERSQPRGRRQPIPKARRPEGRTWAQPGYPWPLYGNEGCGWAGWLLSPRGSRPSWGPTDPRRRSRNLGKVIDTLTCGFADLMGYIPLVGAPLGGAARALAHGVRVLEDGVNYATGNLPGCSFSIFLLALLSCLTVPASAYQVRNSSGLYHVTNDCPNSSIVYEAADAILHTPGCVPCVREGNASRCWVAVTPTVATRDGKLPTTQLRRHIDLLVGSATLCSALYVGDLCGSVFLVGQLFTFSPRRHWTTQDCNCSIYPGHITGHRMAWDMMMNWSPTAALVVAQLLRIPQAIMDMIAGAHWGVLAGIAYFSMVGNWAKVLVVLLLFAGVDAETHVTGGSAGRTTAGLVGLLTPGAKQNIQLINTNGSWHINSTALNCNESLNTGWLAGLFYQHKFNSSGCPERLASCRRLTDFAQGWGPISYANGSGLDERPYCWHYPPRPCGIVPAKSVCGPVYCFTPSPVVVGTTDRSGAPTYSWGANDTDVFVLNNTRPPLGNWFGCTWMNSTGFTKVCGAPPCVIGGVGNNTLLCPTDCFRKHPEATYSRCGSGPWITPRCMVDYPYRLWHYPCTINYTIFKVRMYVGGVEHRLEAACNWTRGERCDLEDRDRSELSPLLLSTTQWQVLPCSFTTLPALSTGLIHLHQNIVDVQYLYGVGSSIASWAIKWEYVVLLFLLLADARVCSCLWMMLLISQAEAALENLVILNAASLAGTHGLVSFLVFFCFAWYLKGRWVPGAVYAFYGMWPLLLLLLALPQRAYALDTEVAASCGGVVLVGLMALTLSPYYKRYISWCMWWLQYFLTRVEAQLHVWVPPLNVRGGRDAVILLMCVVHPTLVFDITKLLLAIFGPLWILQASLLKVPYFVRVQGLLRICALARKIAGGHYVQMAIIKLGALTGTYVYNHLTPLRDWAHNGLRDLAVAVEPVVFSRMETKLITWGADTAACGDIINGLPVSARRGQEILLGPADGMVSKGWRLLAPITAYAQQTRGLLGCIITSLTGRDKNQVEGEVQIVSTATQTFLATCINGVCWTVYHGAGTRTIASPKGPVIQMYTNVDQDLVGWPAPQGSRSLTPCTCGSSDLYLVTRHADVIPVRRRGDSRGSLLSPRPISYLKGSSGGPLLCPAGHAVGLFRAAVCTRGVAKAVDFIPVENLETTMRSPVFTDNSSPPAVPQSFQVAHLHAPTGSGKSTKVPAAYAAQGYKVLVLNPSVAATLGFGAYMSKAHGVDPNIRTGVRTITTGSPITYSTYGKFLADGGCSGGAYDIIICDECHSTDATSILGIGTVLDQAETAGARLVVLATATPPGSVTVSHPNIEEVALSTTGEIPFYGKAIPLEVIKGGRHLIFCHSKKKCDELAAKLVALGINAVAYYRGLDVSVIPTSGDVVVVSTDALMTGFTGDFDSVIDCNTCVTQTVDFSLDPTFTIETTTLPQDAVSRTQRRGRTGRGKPGIYRFVAPGERPSGMFDSSVLCECYDAGCAWYELTPAETTVRLRAYMNTPGLPVCQDHLEFWEGVFTGLTHIDAHFLSQTKQSGENFPYLVAYQATVCARAQAPPPSWDQMWKCLIRLKPTLHGPTPLLYRLGAVQNEVTLTHPITKYIMTCMSADLEVVTSTWVLVGGVLAALAAYCLSTGCVVIVGRIVLSGKPAIIPDREVLYQEFDEMEECSQHLPYIEQGMMLAEQFKQKALGLLQTASRQAEVITPAVQTNWQKLEVFWAKHMWNFISGIQYLAGLSTLPGNPAIASLMAFTAAVTSPLTTGQTLLFNILGGWVAAQLAAPGAATAFVGAGLAGAAIGSVGLGKVLVDILAGYGAGVAGALVAFKIMSGEVPSTEDLVNLLPAILSPGALVVGVVCAAILRRHVGPGEGAVQWMNRLIAFASRGNHVSPTHYVPESDAAARVTAILSSLTVTQLLRRLHQWISSECTTPCSGSWLRDIWDWICEVLSDFKTWLKAKLMPQLPGIPFVSCQRGYRGVWRGDGIMHTRCHCGAEITGHVKNGTMRIVGPRTCRNMWSGTFPINAYTTGPCTPLPAPNYKFALWRVSAEEYVEIRRVGDFHYVSGMTTDNLKCPCQIPSPEFFTELDGVRLHRFAPPCKPLLREEVSFRVGLHEYPVGSQLPCEPEPDVAVLTSMLTDPSHITAEAAGRRLARGSPPSMASSSASQLSAPSLKATCTANHDSPDAELIEANLLWRQEMGGNITRVESENKVVILDSFDPLVAEEDEREVSVPAEILRKSRRFARALPVWARPDYNPPLVETWKKPDYEPPVVHGCPLPPPRSPPVPPPRKKRTVVLTESTLSTALAELATKSFGSSSTSGITGDNTTTSSEPAPSGCPPDSDVESYSSMPPLEGEPGDPDLSDGSWSTVSSGADTEDVVCCSMSYSWTGALVTPCAAEEQKLPINALSNSLLRHHNLVYSTTSRSACQRQKKVTFDRLQVLDSHYQDVLKEVKAAASKVKANLLSVEEACSLTPPHSAKSKFGYGAKDVRCHARKAVAHINSVWKDLLEDSVTPIDTTIMAKNEVFCVQPEKGGRKPARLIVFPDLGVRVCEKMALYDVVSKLPLAVMGSSYGFQYSPGQRVEFLVQAWKSKKTPMGFSYDTRCFDSTVTESDIRTEEAIYQCCDLDPQARVAIKSLTERLYVGGPLTNSRGENCGYRRCRASGVLTTSCGNTLTCYIKARAACRAAGLQDCTMLVCGDDLVVICESAGVQEDAASLRAFTEAMTRYSAPPGDPPQPEYDLELITSCSSNVSVAHDGAGKRVYYLTRDPTTPLARAAWETARHTPVNSWLGNIIMFAPTLWARMILMTHFFSVLIARDQLEQALNCEIYGACYSIEPLDLPPIIQRLHGLSAFSLHSYSPGEINRVAACLRKLGVPPLRAWRHRARSVRARLLSRGGRAAICGKYLFNWAVRTKLKLTPIAAAGRLDLSGWFTAGYSGGDIYHSVSHARPRWFWFCLLLLAAGVGIYLLPNR

SEQ ID NO: 608 - protein, 3010 aa, Artificial Sequence
  AAA75355 HCV subtype 1b HCV-L2 (U01214 (gi437107))
MSTNPKPQRKTKRNTNRRPQDVKFPGGGQIVGGVYLLPRRGPRLGVRATRKTSERSQPRGRRQPIPKARQPEGRAWAQPGYPWPLYANEGLGWAGWLLSPRGSRPSWGPTDPRRRSRNLGKVIDTPTCGFADLMGYIPLVGAPLGGVARALAHGVRVLEDSVNYATGNLPGCSFSIFLLALLSCLTVPASAYEVRNVSGIYHVTNDCSNSSIVYEAADLIMHTPGCVPCVREANSSRCWVALTPTLAARDSSIPTATIRRHVDLLVGAAAFCSAMYVGDLCGSVFLVSQLFTFSPRLHQTVQDCNCSIYPGHLTGHRMAWDMMMNWSPTAALVVSQLLRIPQAIVDMVAGAHWGVLAGLAYYPMVGNWAKVLIVMLLFAGVDGTTVTMGGTVARTTYGFTGLFRPGASQKIQLINTNGSWHINRTALNCNDSLNTGFLAALFYTHRFNASGCPERMASCQSIDKFVQGWGPITYAENGSSDQRPYCWHYAPRRCGIVPASQVCGPVYCFTPSPVVVGTTDRSGAPTYSWGENETDVLLLNNTRPPQGNWFGCTWMSSTGFTKTCGGPPCNIGGAGNNTLTCPTDCFRKHPEATYTKCGSGPWLTPRCLVDYPYRLWHYPCTVNFTTFKVRMYVGGVEHRLIAACNWTRGERCNLEDRDRSELSPLLLSTTEWQILPCSYTTLPALSTGLIHLHQNIVDVQYLYGIGSAVVSFVIKWEYVLLFFLLLADARVCACLWMILLIAQAEAALENLVVLNAASVAGAHGILSFLVFFCAAWYIKGRLVPGAAYASYGVWPLLLLLLALPPRAYAMDQGMAASSGGTVLVGLMLLTLSPYYKVVLARLIWWLQYFITRAEAHLQVWVPPLNVRGGRDAVILLTCAVYPELVFDITKLLLAIFGPLMVLQAGIIKMPYFVRAQGLIRACMLVRKVAGGHYVQMAFMKLAALTGTYVYDHLTPLRDWAHTGLRDLAVAVEPVVFSDMETKIITWGADTAECGDIILGYRSSARRGREILLGPADSLEGQGWRLLAPITAYAQQTRGLLGCIITSLTGRDKNQVEGEVQVVSTATQSFLATCVNGVCWTVFHGAGSKTLAGPKGPITQMYTNVDQDLVGWQAAPGMRSLTPCTCGSSDLYLVTRHADVIPVRRRGDGRGSLLSPRPVSYLKGSSGGPLLWPSGHAVGIFRAAVCTRGVAKAVDFVPVESMETTMRSPVFTDNSSPPAVPQTFQVAHLHAPTGSGKSTKVPAAYAAQGYKVLVLNPSVAATLGFGAYMSKAHGTDPNIRTGARTITTGAPITYSTYGKFFADGGCSGGAYDIIICDECHSTDSTTILGIGTVLDRAETAGARLVVLATATPPGSTTVPHPNIEEVALPNTGEIPFYGRAIPIEFIKGGRHLIFCPSKKKCDELAAKLSALGINAVAYYRGLDVSVIPTSGDVVVVATDALMTGYTGDFDSVIDCNTCVTQTVDFSLDPTFTIETTTVPQDAVSRTQRRGRTGRGRGGIYRFVTPGERPSGMFDSSVLCECYDAGCAWYELTPAETTVRLRAYLNTPGLPVCQDHLEFWESVFTGLNHIDAHFLSQTKQAGDNFPYLVAYQATVCARAQAPPPSWDQMWKCLIWLKPVLHGPTPLLYRLGAVQNEITLTHPITKLIMASMSADLEVVTSTWVLVGGVLAALAAYCLTTGSVVIVGRIILSGRPAVIPDREVLYREFDEMEECASHLPYIEQGVQLAEQFKQKALGLLQTATKQAEAAAPVVESKWRALETFWAKHMWNFISGIQYLAALSTLPGNPAIASLMAFTASITSPLTTQNTLLFNILGGWVAAQLAPASAASAFVGAGSAGAAIGTIGLGKVLVDILAGYGAGVAGALVAFKVMSGEMPSTEDLVNLLPAILSPGALVVGVVCAAILRRHVGPGEGAVQWMNRLIAFASRGNHDSPTHYVPESDAAARVTQILSSLTITQLLKRLHQWINEDCSTPCSGSWLRDVWDWICTVLTDFKTWLQSKLLPRLPGVPFFSCQRGYKGVWRGDGIMQTTCPCGAQITGHVKNGSMRIVGPKTCSNTWHGTFPINAYTTGPCTPAPTPNYSRALWRVAAEEYVEVTRVGDFHYVTGMTTDNVKCPCQVPAPEFFTEVDGVRLHRYAPACKTLLREEVTFQVGLNQYLVGSQLPCEPEPDVAVLTSMLTDPSHITAETAKRRLARGSPPSLASSSASQLSAPSLKATCTTHHDSPDADLIEANLLWRQEMGGNITRVESESKVVILDSFDPLRAEEGEGEVSVAAEILRKSKKFPPALPEWARPDYNPPLLESWKDPDYVPPVVHGCPLPPAKAPPIPPPRRKRTVVLTESTVSSALAELAVKTFGSSESSAVDSGTATAPPDQVSDNGDKGSDAESYSSMPPLEGEPGDPDLSDGSWSTVSEEASEDVVCCSMSYSWTGALITPCAAEESKLPINALSNSLLRHHNMVYATTSRSAGLRQKKVTFDRLQVLDDHYRDVLKEMKAKASTVKAKLLSVEEACKLTPPHSAKSKFGYGAKDVRNLSSRAVNHIRSVWKDLLEDTETPIDTTIMAKSEVFCVQPEKGGRKPARLIVFPDLGVRVCEKMALYDVVSTLPQAVMGPSYGFQYSPGQRVEFLVNAWKSKKCPMGFSYDTRCFDSTVTESDIRTEESIYQCCDLAPEAKQAIKSLTERLYIGGPLTNSKGQNCGYRRCRASVVLTTSCGNTLTCYLKASAACRAAKLQDCTMLVNGDDLVVICESAGTQEDAANLRAFTEAMTRYSAPPGDPPQPEYDLELITSCSSNVSVAHDASGKRVYYLTRDPTTPLARAAWETARHTPVNSWLGNIIMYAPTLWARMILMTHFFSILLAQEQLEKALECQIYGACYSIEPLDLPQIIERLHGLSAFSLHSYSPGEINRVASCLRKLGVPPLRVWRHRARRVRAKLLSQGGRAATCGKYLFNWAVRTKLKLTPIPAASRLDLSSWFVAGYSGGDIYHSVSHARPRWFMLCLLLLSVGVGIYLLPNR

SEQ ID NO: 609 - protein, 3011 aa, Artificial Sequence
  BAA03581.1 HCV subtype 1c HC-G9 (D148539 (gi464177))
MSTNPKPQRKTKRNTNRRPQDVKFPGGGQIVGGVYLLPRRGPRVGVRATRKTSERSQPRGRRQPIPKARRPEGRSWAQPGYPWPLYGNEGCGWAGWLLSPRGSRPSWGPSDPRRRSRNLGKVIDTLTCGFADLMGYIPLVGAPLGGAARALAHGVRVLEDGVNYATGNLPGCSFSIFLLALLSCLTVPASAVGVRNSSGVYHVTNDCPNASVVYETENLIMHLPGCVPYVREGNASRCWVSLSPTVAARDSRVPVSEVRRRVDSIVGAAAFCSAMYVGDLCGSIFLVGQIFTFSPRHHWTTQDCNCSIYPGHVTGHRMAWDMMMNWSPTGALVVAQLLRIPQAIVDMIAGAHWGVLAGLAYYSMVGNWAKVVVVLLLFAGVDAETRVTGGAAGHTAFGFASFLAPGAKQKIQLINTNGSWHINRTALNCNESLDTGWLAGLLYYHKFNSSGCPERMASCQPLTAFDQGWGPITHEGNASDDQRPYCWHYALRPCGIVPAKKVCGPVYCFTPSPVVVGTTDRAGVPTYRWGANETDVLLLNNSRPPMGNWFGCTWMNSSGFTKTCGAPACNIGGSGNNTLLCPTDCFRKHPDATYSRCGSGPWLTPRCLVDYPYRLWHYPCTVNYTIFKIRMFVGGVEHRLDAACNWTRGERCDLDDRDRAELSPLLLSTTQWQVLPCSFTTLPALSTGLIHLHQNIVDVQYLYGLSSAVTSWVIKWEYVVLLFLLLADARICACLWMMLLISQVEAALENLIVLNAASLVGTHGIVPFFIFFCAAWYLKGKWAPGLAYSVYGMWPLLLLLLALPQRAYALDQELAASCGATVFICLAVLTLSPYYKQYMARGIWWLQYMLTRAEALLQVWVPPLNARGGRDGVVLLTCVLHPHLLFEITKIMLAILGPLWILQASLLKVPYFVRAHGLIRLCMLVRKTAGGQYVQMALLKLGAFAGTYIYNHLSPLQDWAHSGLRDLAVATEPVIFSRMEIKTITWGADTAACGDIINGLPVSARRGREVLLGPADALTDKGWRLLAPITAYAQQTRGLLGCIITSLTGRDKNQVEGEVQIVSTATQTFLATCVNGVCWTVYHGAGSRTIASASGPVIQMYTNVDQDLVGWPAPQGARSLTPCTCGASDLYLVTRHADVIPVRRRGDNRGSLLSPRPISYLKGSSGGPLLCPMGHAVGIFRAAVCTRGVAKAVDFVPVESLETTMRSPVFTDNSSPPTVPQSYQVAHLHAPTGSGKSTKVPAAYAAQGYKVLVLNPSVAATLGFGAYMSKAHGIDPNVRTGVRTITTGSPITHSTYGKFLADGGCSGGAYDIIICDECHSVDATSILGIGTVLDQAETAGVRLTILATATPPGSVTVPHSNIEEVALSTEGEIPFYGKAIPLNYIKGGRHLIFCHSKKKCDELAAKLVGLGVNAVAFYRGLDVSVIPTTGDVVVVATDALMTGYTGDFDSVIDCNTCVVQTVDFSLDPTFSIETSTVPQDAVSRSQRRGRTGRGKHGIYRYVSPGERPSGMFDSVVLCECYDAGCAWYELTPAETTVRLRAYLNTPGLPVCQDHLEFWESVFTGLTHIDAHFLSQTKQSGENFPYLVAYQATVCARAKAPPPSWDQMWKCLIRLKPTLTGATPLLYRLGGVQNEITLTHPITKYIMACMSADLEVVTSTWVLVGGVLAALAAYCLSTGSVVIVGRIILSGKPAVIPDREVLYREFDEMEECAAHIPYLEQGMHLAEQFKQKALGLLQTASKQAETITPAVHTNWQKLESFWAKHMWNFVSGIQYLAGLSTLPGNPAIASLMSFTAAVTSPLTTQQTLLFNILGGWVAAQLAAPAAATAFVGAGITGAVIGSVGLGKVLVDILAGYGAGVAGALVAFKIMSGEAPTAEDLVNLLPAILSPGALVVGVVCAAILRRHVGPGEGAVQWMNRLIAFASRGNHVSPTHYVPESDASVRVTHILTSLTVTQLLKRLHVWISSDCTAPCAGSWLKDVWDWICEVLSDFKSWLKAKLMPQLPGIPFVSCQRGYRGVWRGEGIMHARCPCGADITGHVKNGSMRIVGPKTCSNTWRGSFPINAHTTGPCTPSPAPNYTFALWRVSAEEYVEVRRLGDFHYITGVTTDKIKCPCQVPSPEFFTEVDGVRLHRYAPPCKPLLRDEVTFSIGLNEYLVGSQLPCEPEPDVAVLTSMLTDPSHITAETAARRLNRGSPPSLASSSASQLSAPSLKATCTTHHDSPDADLITANLLWRQEMGGNITRVESENKIVILDSFDPLVAEEDDREISVPAEILLKSKKFPPAMPIWARPDYNPPLVEPWKRPDYEPPLVHGCPLPPPKPTPVPPPRRKRTVVLDESTVSSALAELATKTFGSSTTSGVTSGEAAESSPAPSCDGELDSEAESYSSMPPLEGEPGDPDLSDGSWSTVSSDGGTEDVVCCSMSYSWTGALITPCAAEETKLPINALSNSLLRHHNLVYSTTSRSAGQRQKKVTFDRLQVLDDHYRDVLKEAKAKASTVKAKLLSVEEACSLTPPHSARSKFGYGAKDVRSHSSKAIRHINSVWQDLLEDNTTPIDTTIMAKNEVFCVKPEKGGRKPARLIVYPDLGVRVCEKRALYDVVKQLPIAVMGTSYGFQYSPAQRVDFLLNAWKSKKNPMGFSYDTRCFDSTVTEADIRTEEDLYQSCDLVPEARAAIRSLTERLYIGGPLTNSKGQNCGYRRCRASGVLTTSCGNTITCYLKASAACRAAKLRDCTMLVCGDDLVVICESAGVQEDAANLRAFTEAMTRYSAPPGDPPQPEYDLELITSCSSNVSVAHDGAGKRVYYLTRDPETPLARAAWETARHTPVNSWLGNIIMFAPTLWVRMVLMTHFFSILIAQEHLEKALDCEIYGAVHSVQPLDLPEIIQRLHGLSAFSLHSYSPGEINRVAACLRKLGVPPLRAWRHRARSVRATLLSQGGRAAICGKYLFNWAVKTKLKLTPLPSASQLDLSNWFTGGYSGGDIYHSVSHVRPRWFFWCLLLLSVGVGIYLLPNR

SEQ ID NO: 610 - protein, 13 aa, Artificial Sequence
  E2 amino acids 412-424
QLINTNGSWHINS

SEQ ID NO: 611 - DNA, 423 bp, Artificial Sequence
  A Heavy Chain
ctcgagcagtctggggctgaggtgaagaagcctgggtcctcggtgaaagtctcctgcaaggcgtctgggggcaccttcagcagctttgttatcaactgggtgcgacaggcccctggacaagggctagagtgggtgggagggatcttccaggcccccggaccagagcgtgagtggctgcgggacattaacccaatctctgggacgataaactacgcacagaggttccagggcagagtcacgatgaccgcggacgaatccatgaccacagtctacatggagctgagcagtctgagatctgaagacacggccatgtattactgtgcgagagaaaacaaattcagatactgtcgtggtggtagttgctactctggtgcttttgatatgtggggccaggggacaatggtcaccgtctcttcagcctcc

SEQ ID NO: 612 - DNA, 369 bp, Artificial Sequence
  B1 Heavy Chain
ctcgagcagtctggggcagaggtgaagaagccggggtcctcagtgaaagtctcctgcagggcctctggaagcccctttggtagttacacgatcacttgggtgcgacaggcccctggacaaggacttgagtggatgggaggaatcatcctgatgactggtaaagcgaactacgcacagaagttccagggcagagtcacgatcactgcggacagatcaacgaccacagcctacatggaaatgagcagcctgacatctgacgacacggccatttattactgtgcgagagatccctatgtatatgcaggggatgacgtgtggtctttgtctcggtggggccagggaaccctggttatcgtctcctcagcctcc

SEQ ID NO: 613 - DNA, 369 bp, Artificial Sequence
  B2 Heavy Chain
ctcgagcagtctggggcagaggtgaagaagccggggtcctcagtgaaagtgtcctgcagggcctctggaagcccctatagtagttacacgatcacttgggtgcgacaggcccctggacaaggacttgagtggatgggaggaatcatcctgatgactggtaaagcgaactacgcacagaagttccagggcagagtcaccatcactgcggacagagcaacggccacagcctacatggaaatgagcagcctgacatctgacgacacggccatatattactgtgcgagagatccctatgtttatgcaggggatgacgtgcggtctttgtctcggtggggccagggaaccccggtcatcgtctcctcagcctcc

SEQ ID NO: 614 - DNA, 369 bp, Artificial Sequence
  B3 Heavy Chain
ctcgagcagtctggggcagaggtgaagaagccggggtcctcagtgaaagtgtcctgcagggcctctggaagcccctatagtagttacacgatcacttgggtgcgacaggcccctggacaaggacttgagtggatgggaggaatcatcctgatgactggtaaagcgaactacgcacagaagttccagggcagagtcaccatcactgcggacagagcaacggccacagcctacatggaaatgagcagcctgacatctgacgacacggccatatattactgtgcgagagatccctatgtttatgcaggggatgacgtgtggtctttgtctcggtggggccagggaaccccggtcatcgtctcctcagcctcc

SEQ ID NO: 615 - DNA, 378 bp, Artificial Sequence
  C1 and C1* Heavy Chain
ctcgagcagtctggggctgaggtgaagacgcctgggtcctcggtgagggtctcctgcaggcctcctggaggcaacttcaacagttatagtataaactgggtccgacaggcccctggacacggccttgagtgggtggggactttcatccctatgtttggaacctcaaagtacgcgcagaagtttcaggggagagtcacgattaccgcggacgggtcctcgggcaccgcttacatggacctgaacagcctgagatctgacgacacggccttttactactgtgtgcgtcctgaaacgcccagatattgtagtggcggtttctgctatggtgagtttgacaactggggccagggaaccctggtcaccgtctcctcagcctcc

SEQ ID NO: 616 - DNA, 378 bp, Artificial Sequence
  C2 and C2* Heavy Chain
ctcgagcagtctggggctgaagtgaagaagcctgggtcttcggtgagagtctcctgcagggctcctggtggcaccttcaacagctatagtgtgaactgggtccgacaggcccctgggcacggccttgagtgggtggggacgctcatccctatgtttggtacctcaagttacgcgcagaagttccaggggagagtcaccattaccgcggacgggtcctcgggcaccgcctacatggaactgaacagcctgagatctgacgacacggccgtctactactgtgtgcgacctgaaacgcccagatattgtcgtggcggtttctgctatggtgaatttgacaactggggccagggaaccctggtcaccgtctcctcggcctcc

SEQ ID NO: 617 - DNA, 378 bp, Artificial Sequence
  C3 Heavy Chain
ctcgagcagtctggggctgaggtgaaggagcctgggtcctcggtgagggtctcctgcagggctcctggaggcaccttcaacagctatagtataaattgggtccgacaggcccctggacacggccttgagtgggtggggacgctcatccctatgtttggtacctcaaactacgcgcagaagttccaggggagagtcaccattaccgcggacgggtcctcgggcaccgcctacatggagctgaacagcctgagatctgacgacacggccgtatactactgtgtgcgacctgaaacgcccagatattgtagtggcggtgtctgctatggtgaatttgacaactggggccagggaaccctggtcaccgtctcctcagcctcc

SEQ ID NO: 618 - DNA, 375 bp, Artificial Sequence
  C4 Heavy Chain
ctcgagtctggggctgaggtgaagaagcctgggtcctcggtgagggtctcctgcaggcctcctggaggcaccttcaatagctatagtataaactgggtccgacaggcccctggacacggccttgagtgggtggggacgatcatccctatgtttggaacctcaaagtacgcgcagaagttgcaggggagagtcacgattaccgcggacgggtcctcgggcaccgcttacatggagctgaacagcctgagatctgacgacacggccgtatattactgtgtgcgacctgaaacgcccagatattgtagtggcggtttctgctatggtgaatttgacaactggggccagggaaccctggtcaccgtctcctcagcctcc

SEQ ID NO: 619 - DNA, 378 bp, Artificial Sequence
  C5 Heavy Chain
ctcgagcagtctggggctgaggtgaagaagcctgggtcctcggtgagggtctcctgcagggctcctggaggcaccctcaacagctatagtataaactgggtccgacaggcccctggacacggccttgagtgggtggggacgctcatccctatgtttggtacctcaaactacgcgcagaagttccaggggagagtcaccattaccgcggacgggtcctcgggcaccgcctacatggagctgaacagcctgagatctgacgacacggccgtatactactgtgtgcgacctgaaacgcccagatattgtagtggcggtttctgctatggtgaatttgacaactggggccagggaaccctggtcaccgtctcctcagcctcc

SEQ ID NO: 620 - DNA, 378 bp, Artificial Sequence
  C6 Heavy Chain
ctcgagcagtctggggctgaggtgaagaagcctgggtcctcggtgagggtctcctgcaggcctccgggaggcaccttcaacagttatagtataaactgggtccgacaggcccctggacacggccttgagtgggtggggacgatcatccctatgtttggaacctcaaaatacgcgcagaagttgcaggggagagtcacgattaccgcggacgggtcctcgggcaccgcttacatggagctgaacagcctgagatctgacgacacggccgtatactactgtgtgcgacctgaaacgcccagatattgtagtggcggtttctgctatggtgaatttgacaattggggccagggaaccctggtcaccgtctcctcagcctcc

SEQ ID NO: 621 - DNA, 366 bp, Artificial Sequence
  D1 Heavy Chain
ctcgagtctgggggaggcttggtccagccgggggggtccctgagactctcctgtgaagcctctggatattatttcagtagctttgccatgagttgggtccgccagactccagggaagggactggagtgggtctccagtattgctggtggtactcttggaagaacatcctatagagactccgtgaagggccgcttcaccatctccagagacaactccaagaatacggtgtttctccacatgaacaacctgagacccgaggacacggccgtctattattgtgcgaaagatccacttctcttcgcaggaggacctaattggttcgaccactggggccagggaaccctggtcaccgtctcctcagcctcc

SEQ ID NO: 622 - DNA, 369 bp, Artificial Sequence
  D2 Heavy Chain
ctcgagcagtctgggggaggcttggtccagccgggggggtccctgagactctcctgtgaagcctctggatattatttcagtagctttgccatgagttgggtccgccagactccagggaagggactggagtgggtctccagtattgctggtggtactcttggaagaacatcctatagagactccgtgaagggccgcttcaccatctccagagacaactccaagaatacggtgtttctccacatgaacaacctgagacccgaggacacggccgtctattattgtgcgaaagatccacttctcttcgcaggaggacctaattggttcgaccactggggccagggaaccctggtcaccgtctcctcagcctcc

SEQ ID NO: 623 - DNA, 366 bp, Artificial Sequence
  D3 Heavy Chain
ctcgagtctgggggaggcttggtccagccgggggggtccctgagactctcctgtgaagcctctggatattatttcagtagctttgccatgagttgggtccgccagactccagggaagggactggagtgggtctccagtattgctggtggtactcttggaagaacatcctatagagactccgtgaagggccgcttcaccatctccagagacaactccaagaatacaatgtttctccacatgaacaacctgagacccgaggacacggccgtctattattgtgcgaaagatccacttctcttcgcaggaggacctaattggttcgaccactggggccagggaaccctggtcaccgtctcctcagcctcc

SEQ ID NO: 624 - DNA, 366 bp, Artificial Sequence
  D4 Heavy Chain
ctcgagtctgggggaggcttggtccagccgggggggtccctgagactctcctgtgaagcctctggatattatttcagtagctttgccatgagttgggtccgccagactccagggaagggactggagtgggtctccagtattgctggtggtactcttggaagaacatcctatagagactccgtgaagggccgcttcaccatctccagagacaactccaagaatacggtgtttctccacatgagcaacctgagacccgaggacacggccgtctattattgtgcgaaagatccacttctcttcgcaggaggacctaattggttcgaccactggggccagggaaccctggtcaccgtctcctcagcctcc

SEQ ID NO: 625 - DNA, 360 bp, Artificial Sequence
  E Heavy Chain
ctcgagcagtctggggctgagctgaagaagcctgggtcttcggtgaaggtctcctgcaagccctctgatggcaccttcagggcctatactctcagctgggtgcgacaggcccctggacaaacgcttgagtggatgggcaggatcatgcctactgttggcataacaaactacgcacagaaattccagggcagagtcaccatttccgcggacatgtccacggccacagcctacatggaactgagcagcctgcgatctgacgacacggccatatattactgtgcgaaaggcccgtacgttggccttggggaagggttctcggagtggggccagggaactctggtcaccgtctcctcagcctcc

SEQ ID NO: 626 - DNA, 354 bp, Artificial Sequence
  F Heavy Chain
ctcgagcagtcaggaaatgaggtgaagaagccaggggcctcagtgaaagtctcctgccgggcttatggctacaattttggcagcgaacgtctcagctgggtgcgacaggcccctggacaaggccttgagtggatgggatggatcagcgcttacaatggtggcataaactattcacagaagttccagggcagattcaccatgaccacagacacgtccacgcgcacaggctacatggaattgaggaacctcagatctgacgacacggccgtctattactgtgcgagagggggggggactgagtggggccagggaaccctggtcatcgtctcctcagatgagtcctcctcagcctcc

SEQ ID NO: 627 - DNA, 378 bp, Artificial Sequence
  G Heavy Chain
ctcgagcagtcaggagctgagatgaagaagcctggggcctcattgaaggtctcctgcaagacttctggttacacgtttgacgactatggtgtcacctgggtgcgacaggcccctggacaaggacttgagtggatgggctggatcagcgcttacagtggtaacacattctatgcacggaagttccagggcagagtcaccatgaccacagacccatccacgcgcactgcctacatggagctgaggagcctgagatctgacgacacggccgtgtatttctgtgcgagagatcctggtcttgcgattaatggagtggttttcccctacttcggtttggacgtctggggccaagggaccacggtcaccgtctcatcagcctcc

SEQ ID NO: 628 - DNA, 378 bp, Artificial Sequence
  H1, H1* and H1** Heavy Chain
ctcgagcagtctggggctgaggtgaagaagcctggctcctcggtgaaagtctcctgcgaggcttctggaggcaccttcgacaactattctctcaattgggtgcgacaggcccctggacaaggacttgagtggataggaggggtcgtccctttgttcggtacaacaaaatacgcacagaagttccagggcagagtcacgataagcgacgacaaatcgacgggcacaggacacatggagttgagaagcctgagatcggaagacacggccgtctattattgtgtgagatcagtcacgcccagacattgtggtggtgggttttgctacggtgaatttgactactggggccagggaaccctggtcaccgtctcctcagcctcc

SEQ ID NO: 629 - DNA, 378 bp, Artificial Sequence
  H2 Heavy Chain
ctcgagcagtctggggctgaggtgaagaagcctggctcctcggtgaaagtctcctgcgagacttctggagggactttcgacaactatgctctcaattgggtgcgacaggcccctggacaaggacttgagtggataggaggggtcgtccctttgttcggtacaacaaaatacgcacagaagttccagggcagagtcacgataagcgacgacaaatcgacgggcacaggacacatggagttgagaagcctgagatcggaagacacggccgtctattattgtgtgagatcagtcacgcccagacattgtggtggtgggttttgctacggtgaatttgactactggggccagggaaccctggtcaccgtctcctcagcctcc

SEQ ID NO: 630 - DNA, 378 bp, Artificial Sequence
  H3 Heavy Chain
ctcgagcagtctggggctgaggtgaagaagcctggctcctcggtgaaagtctcctgcgagacttctggagggaccttggacaactatgctctcaattgggtgcgacaggcccctggacaaggacttgagtggatcggaggggtcgtccctttgtttggtacaacaagaaacgcacagaagttccagggcagagtcacgataagcgacgacaaatcgacgggcacaggacacatggagttgagaagcctgcgatcggaagacacggccgtttattattgtgtgagatcagtcacgcccagatattgtggtggtgggttttgctacggtgaatttgactactggggccagggaaccctggtcaccgtctcctcagcctcc

SEQ ID NO: 631 - DNA, 381 bp, Artificial Sequence
  I Heavy Chain
ctcgagtctgggggaggcttggtacagccagggcggtccctgagactctcctgcaaagcgtctggcttcaattttgctcagtatactatgaactgggtccgccaggctccagggaagggactggagtggatcgggctcattagaaccacagcttatgatgcggctacacattatgctgcgtctgtggagggcagattcaccatttccagagatgattccaaaagtaccgcctatctgcagataaacggcctgaaaaccgaggacacagccgtctattactgtgctagaccccatggacccgggttaagtcttggcatttacagcgctgaatacttcgatgagtggggccagggcaccctggtcaccgtctcctcagcctcc

SEQ ID NO: 632 - DNA, 378 bp, Artificial Sequence
  J1 Heavy Chain
ctcgagcagtctgggcctgaggtgaagaagcctgggtcctcggtgaaggtctcctgcaagggttctggagacaggttcaacgatcctgtcacctgggtgcgacaggcccctggacaaggccttgagtggatcggaggaatcatccctgcgtttggtgcaacaaagtatgcacagaagttccagggcagagtcgtcatttccgcggacgcatccacggacacggcctacatggaactgagcagcctgagatctgaagacacggccgtctattattgtgcgaaagtaggcgtgcggggcattattttggttgggggcctggcgatgaactggctcgacccctggggccagggaaccctagtcaccgtctccgcagcctcc

SEQ ID NO: 633 - DNA, 378 bp, Artificial Sequence
  J2 Heavy Chain
ctcgagcagtctgggcctgaggtgaagaagcctgggtcgtcggtgaaggtctcctgcaaggattctggagacaccttcaacgaacctgtcacctgggtgcgacaggcccctggacaaggccttgagtggatcggaggaatcatccctgcgtttggtgtgacaaagtacgcacagaaattccagggccgagtcatcatttccgcggacgcatctacggccacggcctatttggagctgagcagtctgagatctgaagacacggccgtctattactgtgcgaaagttggcctgcggggcattgtaatggttgggggcctggcgatgaactggctcgacccctggggccagggaacccaagtcaccgtctcctcagcctcc

SEQ ID NO: 634 - DNA, 378 bp, Artificial Sequence
  J3 and J3* Heavy Chain
ctcgagcagtctgggcctgaggtgaagaagcctgggtcctcggtgaaagtctcctgcaagggttctggagacaccttcaacgatcctgtcacctgggtgcgacaggcccctggacaaggccttgagtggatcggaggaatcatccctctgtttggtgcagcaaaatacgcacagaagttccagggcagagtcacgatttccgcggacgcatcagcgttaacgacctacatggagatgagcagcctgagaccggaagacacggccgtctattattgtgcgaaagtgggtctgcggggcattactttggttgggggcctggcgatgaactggctcgacccctggggccagggaaccctaatcacggtctcctcagcctcc

SEQ ID NO: 635 - DNA, 378 bp, Artificial Sequence
  J4 Heavy Chain
ctcgagcagtctggggctgaggtgaagaagcctgggtcctcggtgagagtctcctgcgaggtttctggagacaccttcagggagcctgtcagttgggtgcgacaggcccctggacaaggatttgagtggatcggaggaatcatccctatgtttggcgcaacacattacgcacagaagttacagggcagaatcactatttctgcggaccaatcgacgaacacagtctacatggaactgaggagcctgagatctgacgacacggcagtttattattgtgcgaaagttggactgcggggcattaatatggttgggggcctggcgatgaactggttcgacccctggggccagggaaccctagtcaccgtctcctcagcctcc

SEQ ID NO: 636 - DNA, 381 bp, Artificial Sequence
  K Heavy Chain
ctcgagcagtcaggtccaggactggtgaagcctggcagacccttttcactcacctgtgccatctccggggacagtgtctctagcgacagtgctgcttggaactgggtcaggcagtccccgtcgagaggccttgagtggctgggaaggacattctacaggtccaagtggtattatgattatacagtatctgtgaaaagtcgaatcaccatcaactcagacacatccaagaaccagttttccctgcacctcaactctgtgactcccgaggacacggctgtgtattattgtgtaagagatttttatattggcccaaccagagacgtctactacggtatggacgtctggggccaagggaccacggtcaccgtctcctcagcctcc

SEQ ID NO: 637 - DNA, 390 bp, Artificial Sequence
  L1 Heavy Chain
ctcgagcagtctggggctgaggtgaagaagcctgggtcgtcggtgaaggtctcctgcaaggcttctggagacaccttcagaagttatgtcatcacatgggcgcgacaggcccctggacaagggcttgagtggatgggagcgatcatccctttctttggaacaacaaacctcgcacagaaattccagggcagagtcacgattaccgcggacgaatcaacgcagacagtctacatggacttgagcagcctgagatctgacgacacggccgtttattattgtgcgaaagccggagatctttcagttgggggagttctcgccggcggggttccgcacttgcgacattttgacccctggggccagggaaccctggtcaccgtctcctcggcctcc

SEQ ID NO: 638 - DNA, 390 bp, Artificial Sequence
  L2 Heavy Chain
ctcgagcagtctggggctgaggtgaagatgcccgggtcgtcggtgaaggtctcctgcaaggcttctggagacacgttcagaagttctgttatcacatgggcgcgacaggcccctggacaggggcttgagtggatgggagcgatcatccctttctttggaacaacaaacctcgcacagaagttccagggcagagtcacgattaccgcggacgaatcaacgaagacagtctacatggacttgagcagcctgagatctgatgacacggccgtttattattgcgcgaaagccggagatctttcagttgggggagttctcgccggcggggttccgcacttgcgacatttcgacccctggggccagggaaccctggtcaccgtctcctcggcctcc

SEQ ID NO: 639 - DNA, 390 bp, Artificial Sequence
  L3 Heavy Chain
ctcgagcagtctggggctgaggtgaagaagcctgggtcgtcggtgaaggtctcctgcaaggcttctggagacaccttcagaagttatgttatcacatgggcgcgacaggcccctggacaagggcttgagtggatgggagcgatcatccctttctttggaacaacaaacctcgcacagaagttccagggcagagtcacgattaccgcggacgaatcaacgaagacagtctacatggacttgagcagcctgacatctgatgacacggccgtttattattgtgcgaaagccggagatctttcagttgggggagttctcgccggcggggttccgcacttgcgacatttcgacccctggggccagggaaccctggtcaccgtctcctcggcctcc

SEQ ID NO: 640 - DNA, 390 bp, Artificial Sequence
  L4 Heavy Chain
ctcgagcagtctggggctgaggtgaagaagcctgggtcgtcggtgaaggtctcctgcaaggcttctggagacaccttcagaagttatgttatcacatgggcgcgacaggcccctggacaagggcttgagtggatgggagcgatcatccctttctttggaacaacaaacctcgcacagaagttccagggcagagtcacgattaccgcggacgaatcaacgaagacagtctacatggacttgagcagcctgagatctgatgacacggccgtttattattgtgcgaaagccggagatctttcagttgggggagttctcgccggcggggttccgcacttgcgacatttcgacccctggggccagggaaccctggtcaccgtctcctcggcctcc

SEQ ID NO: 641 - DNA, 378 bp, Artificial Sequence
  M Heavy Chain
ctggagcagtcaggagctgaggtgaagaagcctggggcctcagtgaaggtctcctgcaaggcctctggttacacttttactaactatgcaattacctgggtgcgacaggcccctggacaaggtcttgagtggatgggatggatcagcggtgacagcactaacacatactatggtcagaagttccagggaagagtcaccatgacgacagacacatccacgagcacagcctacatggagttgacgagcctgacatctgaggacacggccgtgtattactgtgcgagagaatcgctctatatgattgcgtttgggagagttatatggccaccacttgactactggggccagggaactctggtcaccatctcctctgcctcc

SEQ ID NO: 642 - DNA, 393 bp, Artificial Sequence
  A Light Chain
gagctcacacagtctccagccaccctgtctgtgtctcctggggaaagcgccaccctctcctgcagggccagtcagagtgttagcgacaacttagcctggtaccagcagaaacctggccaggctcccaggctcctcatctatggtgcatccagcagggcccctgccatcccaggcaggttcagtggcagtgggtctgggacagacttcactctcaccatcagcagactggagcctgaagatcttgcagtgtatcactgtcagcagtatggtgcgtcaccttggacgttcggccaagggaccaaggtggaaatcaaacgaactgtggctgcaccatctgtcttcatcttcccgccatctgatgagcagttgaaatctggaactgcctctgttgtg

SEQ ID NO: 643 - DNA, 402 bp, Artificial Sequence
  B1 Light Chain
gagctcacactcacgcagtctccaggcaccctgtctttgtctccaggggaaagagccaccctctcctgtagggccagtcagagtgttagcaacagctacttagcctggtaccagcagaaacctggccaggctcccaggctcctcatctatggtgcatccagcagggccactggcatcccagacaggttcagtggcagtgggtctgggacagacttcactctcaccatcagcagactggagcctgaagattttgcagtgtattactgtcaacagtatggtagctcacctcagacgttcggccaagggaccaaggtggaaatcaaacgaactgtggctgcaccatctgtcttcatcttcccgccatctgatgagcagttgaaatctggaactgcctctgttgtg

SEQ ID NO: 644 - DNA, 411 bp, Artificial Sequence
  B2 Light Chain
gagctcacccagtctccagactccctggctgtgtctctgggcgagagggccaccatcaactgcaagtccagccagagtgttttatacagctccaacaataagaactacttagcttggtaccagcagaaaccagggcaacctcctcagctgctcatttactgggcatctacccgggaatccggggtccctgaccgattcagtggcagcgggtctgggacagatttcactctcaccatcagcagcctgcaggctgaagatgtggcagtttatttctgtcagcaatattatagtactcccttcactttcggccctgggaccaaagtggaaatcaaacgaactgtggctgcaccatctgtcttcatcttcccgccatctgatgagcagttgaaatctggaactgcctctgttgtg

SEQ ID NO: 645 - DNA, 393 bp, Artificial Sequence
  B3 Light Chain
gagctcgtgatgacacagtctccaggcaccctgtctttgtctccaggggaaagagccaccctctcctgcagggccagtcagcgtgttggcagcagctacttagcctggtaccagcagaaacctggccaggctcccaggctcctcgtctatggtgcatccagcagggccactggcatcccagacaggttcagtggcagtgggtctgggacagacttcactctcaccatcagcaggctgcagcctgaagattttgcagtatattactgtcagcagtatggtacgacgttcggccaagggaccagggtggacatcaaacgaactgtggctgcaccatctgtctccatcttcccgccatctgatgagcagttgaaatctggaactgcctctgttgtg

SEQ ID NO: 646 - DNA, 399 bp, Artificial Sequence
  C1 Light Chain
gagctcacactcacgcagtctccaggcaccctgtctttgtctccagggaaaagagccaccctctcctgcagggccagtcagagtgttagcggcagctacttagcctggtaccagcagaaacctggccaggctcccaggctcctcatctatggtgcatccaacagggccactggcatcccacacaggttcagtggcagtgggtctgggacagacttcactctcaccatcagcagactggagcctgaggattttgcagtgtattactgtcagcagtatggttcctcaccgacgttcggccaggggaccagggtggacatcaaacgaactgtggctgcaccatctgtcttcatcttcccgccatctgatgagcagttgaaatctggaactgcctctgttgtg

SEQ ID NO: 647 - DNA, 360 bp, Artificial Sequence
  C1* Light Chain
gagctcacgcagtctccaagcaccctgtctttgtctccaggggaaggagccaccctctcctgcaggcccagtcagagtgttagtagaaactacctagcctggtatcagcagaaacctggccaggctcccagactcctcatctatggtgcgtccaccagggccaccggcatcccagacaggttcagtggcagtgggtctgggacaaacttcactctcaccatcagcagactggagcctgaagattttgcagtgtatttctgtcagcactatggtaactcacctccatacacttttggccaggggaccaagctggagatcaaacgaactgtggctgcaccatctgtcttcatcttcccgcca

SEQ ID NO: 648 - DNA, 360 bp, Artificial Sequence
  C2 Light Chain
gagctcacgcagtctccaggcaccctgtctttgtctccaggggaaagagccgccctctcttgcagggccagtcagagtattagcaccaactacttagcctggtaccagcagaaaccaggccaggctcccaggctcctcatctatggtacgtccaacagggccactggcatcccagacaggttcagtggcactgggtctgggacagacttcagtctcaccatcagcagactggagcctgaagattctgcagtgtattactgtcagcagtatggtacctcaccattcactttcggccctgggaccaaagtggatatcaaacgaactgtggctgcaccatctgtcttcatcttcccgccatct

SEQ ID NO: 649 - DNA, 396 bp, Artificial Sequence
  C2* Light Chain
gagctcacacagtctccaggcaccctgtctttgtctccaggggaaagagccaccctctcctgcagggccagtcagagtgttagcagcagctacttagcctggtaccagcagaaacctggccaggctcccaggctcctcatctatggtgcatctagcagggccactggcatcccagacaggttcagtggcagtgggtctgggacagacttcactctcaccatcagcagactggagcctgaagattttgcagtgtattactgccaacagtatggtagctcacctcagacgttcggccaagggaccaaggtggaaatcaaacgaactgtggctgcaccatctgtcttcatcttcccgccatctgatgagcagttgaaatctggaactgcctctgttgtg

SEQ ID NO: 650 - DNA, 360 bp, Artificial Sequence
  C3 Light Chain
gagctcacgcagtctccaggcaccctgtctttgtctccaggggaaagagccaccctctcctgcagggccagtcagagtgttagcagcagctacttagcctggtaccagcagaaacctggccaggctcccaggctcctcatctatggtgcatccagcagggccactggcatcccagacaggttcagtggcagtgggtctgggacagacttcactctcaccatcagcggactggagcctgaagattttgcagtgtattactgtcagcagtatggaagctcacctctcactttcggcggagggaccaaggtggagatcaaacgaactgtggctgcaccatctgtcttcatcttcccgccatct

SEQ ID NO: 651 - DNA, 396 bp, Artificial Sequence
  C4 Light Chain
gagctcacgcagtctccaggcaccctgtctttgtctccaggggaaagagccaccctctcctgcagggccagtcagagtgttagcagcagctacttagcctggtaccagcagaaacctggccaggctcccaggctcctcatctatggtgcatccagcagggccactggcatcccagacaggttcagtggcagtgggtctgggacagacttcactctcaccatcagcagactggagcctgaagattttgcagtgtattactgtcagcactatggaagttcatcgtacactttcggccaggggaccagggtggagatcaaacgaactgtggctgcaccatctgtcttcatcttcccgccatctgatgagcagttgaaatctggaactgcctctgttgtg

SEQ ID NO: 652 - DNA, 396 bp, Artificial Sequence
  C5 Light Chain
gagctcacgcagtctccaggcaccttgtatgtgtctcctggggaaagagccaccctctcctgcagggccagtcagagtgttcccgacaaccacttagcctggtaccagcagaaacctggccagactcccaggctcctcatctatggtgcatccaagagggccacgggcatcccagacaggttcagtggcagtgggtctgggacagacttcactctcaccatcagcagactggagcctgaagattttgcagtgtattactgtcagcagtatggtagctcacctcagacgttcggccaagggaccaaggtggaaatcaaacgaactgtggctgcaccatctgtcttcatcttcccgccatctgatgagcagttgaaatctggaactgcctctgttgtg

SEQ ID NO: 653 - DNA, 396 bp, Artificial Sequence
  C6 Light Chain
gagctcacacagtctccagccaccctgtctgtgtctccaggggaaagcgccaccctctcctgcagggccagtcagagtgttagcagcaacttagcctggtaccagcagaaacctggccaggctcccaggctcctcatctatggtgcatcgaccagggccactggtatcccagccaggttcagtggcagtgggtctgggacagacttcactctcaccatcagcagactggagcctgaagattttgcagtgtattactgtcagcagtatggtggctcacctccgtacacttttggccaggggaccaagctggagatcaaacgaactgtggctgcaccatctgtcttcatcttcccgccatctgatgagcagttgaaatctggaactgcctctgttgtg

SEQ ID NO: 654 - DNA, 378 bp, Artificial Sequence
  D1 Light Chain
gagctcacgcagtctccaggcaccctgtctttgtctccaggggaaagagccaccctctcctgcagggccagtcagagtgttagcagcagctacttagcctggtaccagcagaaacctggccaggctcccaggctcctcatctatggtgcatccagcagggccactggcatcccagacaggttcagtggcagtgggtctgggacagacttcactctcaccatcagcagactggagcctgaagattttgcagtgtattactgtcaacagtatggtagctcacctcagacgttcggccaagggaccaaggtggaaatcaaacgaactgtggctgcaccatctgtcttcatcttcccgccatctgatgagcagttgaaatcg

SEQ ID NO: 655 - DNA, 360 bp, Artificial Sequence
  D2 Light Chain
gagctcacgcagtctccagccaccctgtctgtgtctccaggggaaagagccaccctctcctgcagggccagtcagactattagcgacaacttagcctggtaccagcagaaacctggccaggctcccaggctcctcatctatggtgcatccagcagggccactggcatcccagacaggttcagtggcagtgggtctgggacagacttcactctcaccatcagcagactggagcctgaagattttgcagtatattactgtcaacagtatggtagctcacctcagacgttcggccaagggaccaaggtggaaatcaaacgaactgtggctgcaccatctgtcttcatcttcccgccatctgat

SEQ ID NO: 656 - DNA, 393 bp, Artificial Sequence
  D3 Light Chain
gagctcacactcacgcagtctccaggcaccctgtctttgtctccaggggaaagagccaccctctcctgcagggccagtcagactgttagcagcagctacttagcctggtaccagcagaaacctggccaggctcccaggctcctcatctatggtgcatccagcagggccactggcatcccagacaggttcagtggcagtgggtctgggacagacttcactctcaccatcagcagactggagcctgaagattttgcagtgtattactgtcaacagtatggtagctcacctcagacgttcggccaagggaccaaggtggaaatcaaacgaactgtggctgcaccatctgtcttcatcttcccgccatctgatgagcagttgaaatctggaactgct

SEQ ID NO: 657 - DNA, 393 bp, Artificial Sequence
  D4 Light Chain
gagctcgtgatgacacagtctccaggcaccctgtctttgtctccaggggaaagagccaccctctcctgcagggccagtcagagtgttagcagcagctacttagcctggtaccagcagaaacctggccaggctcccaggctcctcatctatggtgcatccagcagggccactggcatcccagacagattcagtggcagtgggtctgggacagacttcactctcaccatcaccagactggagcctgaagattttgcagtgtattactgtcaacagtatggtagctcacctcagacgttcggccaagggaccaaggtgcaaatcaaacgaactgtggctgcaccatctgtcttcatcttcccgccatctgatgagcagttgaaatctggaactgct

SEQ ID NO: 658 - DNA, 405 bp, Artificial Sequence
  E Light Chain
gagctcgtgttgacgcagtctccactctccctgcccgtcacccttggacagccggcctccatctcctgcaggtctactcagagcctcgtttacagtgatggaaacacctacttgaattggtttcaccagagggcaggccaacctccaaggcgcctaatttataaggtctctaaccgggactctggggtcccagagagattcagcggcagtgggtcaggcactgatttcacactgaaaatcagcagggtggaggctgaggatgttggcatttattactgcatgcaaggagcacactggcctcccactttcggcggagggaccaaggtggagatcaatcgaactgtggctgcaccatctgtcttcatcttcccgccatctgatgagcagttgaaatctggaactgct

SEQ ID NO: 659 - DNA, 363 bp, Artificial Sequence
  F Light Chain
gagctccagatgacccagtctccatccttcctgtccgcttctgtgggagacagagtcaccatcacttgccgggccagtcagggcattagcagttatttagcctggtatcagcaaaaaccagggaaagcccctaagctcctgatctcttctgtatccactttgcaaagtggggtctcatcaaggttcagcggcagtggatctgggacaggattcactctcacaatcagcagcctgcagtctgaagattctgcaacttattactgtgaacaactgaatagtttcccgtacacttttggccaggggaccaagctggagatcaaacgaactgtggctgcaccatctgtcttcatcttcccgccatct

SEQ ID NO: 660 - DNA, 375 bp, Artificial Sequence
  G Light Chain
gagctcactcagtctccagtctccctgcccgtcacccctggagagccggcctccatctcctgcaggtctagtcagagcctcctgcatagtaatggaaaccactatttggattggtacctgcagaagccagggcagtctccacagctcctgatgtatttgggttctaatcgggcctccggggtccctgacaggttcagtggcagtggatcaggcacagattttacactgaaaatcagcagagtggaggctgaggatgttggggtttattactgcatgcaaggtctacagaccccgtggacgttcggccaagggaccaaggtggaaatcaaacgaactgtggctgcaccatctgtcttcatcttcccgccatctgat

SEQ ID NO: 661 - DNA, 369 bp, Artificial Sequence
  H1 Light Chain
gagctcacactcacgcagtctccaggcaccctgtctttgtctccaggggaaagagccaccctctcctgcagggccagtcagagtattagcagcagctacttagcctggtaccagcagaaacctggccaggctcccaggctcctcatctatggtgcatccagaagggccactggcatcccagacaggttcagtggcagcgggtctgggacagacttcactctcaccatcagcagactggagcctgaagattttgcagtgtattactgtcagcagtatggtagctcaccgctcactttcggcggagggaccaaggtggagatcaaacgaactgtggctgcaccatctgtcttcatcttcccgccatctgat

SEQ ID NO: 662 - DNA, 366 bp, Artificial Sequence
  H1* Light Chain
gagctcacacagtctccagccaccctgtccgtgtctccaggggaaagagccaccctctcctgcagggccagtcggggtattagcagcaacttagcctggtaccagcagaagcctggccaggctcccaggctcctcatctatggtgcatccagcagggccactggcatcccagacaggttcagtggcagtggatctgggacagacttcactctcaccatcagcagactggagcctgaagattttgcagtgtattactgtcaacagtatggtagctcacctcagacgttcggccaagggaccgaggtggaaatcaaacgaactgtggctgcaccatctgtcttcatcttcccgccatctgatgagcag

SEQ ID NO: 663 - DNA, 408 bp, Artificial Sequence
  H1** Light Chain
gagctcacactcacgcagtctccaggcaccctgtctttgtctccaggggagagagccaccctctcctgcagggccagtcagagtgttagcagcgactccttagcctggtaccagcagaaacctggccaggctcccaggctcctcatctatggtgcctctagcagggccactggcatcccagacaggttcagtggcagtgggtctgggacagacttcactctcaccatcagcagactggagcctgaagatcttggagtgtattactgtcagcagtatggtccctcacctccggggtacacttttggccaggggaccaagctggagatcaaacgaactgtggctgcaccatctgtcttcatcttcccgccatctgatgagcagttgaaatctggaactgcctctgttgtg

SEQ ID NO: 664 - DNA, 402 bp, Artificial Sequence
  H2 Light Chain
gagctcacactcacgcagtctccgggcaccctgtctttgtctccaggggaaagaggcaccctctcctgcagggccagtcagagtgttagcagcagctacttagcctggtaccagcagaaacctggccaggctcccaggctcctcatctatggtgcatccagcagggccactggcatcccagacaggttcagtggcagtgggtctgggacagacttcactctcaccatcagcagactggagcctgaagattttgcagtgtattactgtcagcagtatggtagctcacctcagacgttcggccaagggaccaaggtggaaatcaaacgaactgtggctgcaccatctgtcttcatcttcccgccatctgatgagcagttgaaatctggaactgcctctgttgtg

SEQ ID NO: 665 - DNA, 393 bp, Artificial Sequence
  H3 Light Chain
gagctcacacagtctccagccaccctgtctgtgtctccaggggaaagagccaccctctcctgcagggccagtcagagtgttagcagcaacttagcctggtaccagcagaaacctggccaggctcccaggctcctcatctatggtgcatccaccagggccactggtatcccagccaggttcagtggcagtgggtctgggacagagttcactctcaccgtcagcagactggagcctgaagattctgcagtgtatttctgtcagcagtattataggtccccactcactttcggcggagggaccaaggtggagatcaaacgaactgtggctgcaccatctgtcttcatcttcccgccatctgatgagcagttgaaatctggaactgcctctgttgtg

SEQ ID NO: 666 - DNA, 366 bp, Artificial Sequence
  I Light Chain
gagctcacactcacgcagtctcccgccaccctgtctgtttctccaggggaaagagccacccttttttgtagggccaatcagagtgttggccgcaacttagcctggtaccagcagaaacctggccaggctcccaggctcctcatttatggtatatccaccaggaccactactaccccaaccaggttcagtggcagtgggtctgggacagacttcactctcaccatcagccgcctgcagtctgaagattttgcagtttattactgtcagcagtataacaagtggcctccgtggacgttcggccaagggaccaagttggaaatcaaacgaactgtggctgcaccatctgtcttcgtcttcccgccatct

SEQ ID NO: 667 - DNA, 402 bp, Artificial Sequence
  J1 Light Chain
gagctcgtgttgacacagtctccaggcaccctgtctttgtctccaggggaaagagccaccctctcctgcagggccagtcagagtgttagcagcagctacttagcctggtaccagcagaaacctggccaggctcccaggctcctcatctatggtgcatccagcagggccactggcatcccagacaggttcagtggcagtgggtctgggacagacttcgctctcaccatcaccagactggagcctgaagattttgcagtgtattactgtcagcagtatggtagctcacctcagacgttcggccaagggaccaaggtggaaatcaaacgaactgtggctgcaccatctgtcttcatcttcccgccatctgatgagcagttgaaatctggaactgtctctgttgtg

SEQ ID NO: 668 - DNA, 402 bp, Artificial Sequence
  J2 Light Chain
gcggccgagctcactcagtctccaggcaccctgtctttgtctccaggggaaagagccaccctctcctgcagggccagtcagagtgttagcagcagctacttagcctggtaccagcagaaacctggccaggctcccaggctcctcatctatggtgcatccagcagggccactggcatcccagacaggttcagtggcagtgggtctgggacagacttcactctcaccatcagcagactggagcctgaagattttgcagtgtattactgtcagcagtatggtagctcacctcagacgttcggccaagggaccaaggtggaaatcaaacgaactgtggctgcaccatctgtcttcatcttcccgccatctgatgagcagttgaaatctggaactgcctctgttgtg

SEQ ID NO: 669 - DNA, 393 bp, Artificial Sequence
  J3 Light Chain
gagctcacgcagtctccaggcaccctgtctttgtctccaggggaaagagccaccctctcctgcagggccagtcagagtgttagcagcagctacttagcctggtaccagcagaaacctggccaggctcccaggctcctcatctatggtgcatccagcagggccactggcatcccagacaggttcagtggcagtgggtctgggacagacttcactctcaccatcagcggactggagcctgaagattttgcagtgtattactgtcaacaatatggtagctcacctcagacgttcggccaagggaccaaggtggaaatcaaacgaactgtggctgcaccatctgtcttcatcttcccgccatctgatgagcagttgaaatctggaactgcctctgtt

SEQ ID NO: 670 - DNA, 402 bp, Artificial Sequence
  J3* Light Chain
gagttcacactcacgcagtctccaggcaccctgtctttgtctccaggggaaagaggcaccctctcctgcagggccagtcagagtgttagcagcagctacttagcctggtaccagcagaaacctggccaggctcccaggctcctcatctatggtgcatccagcagggccactggcatcccagacaggttcagtggcagtgggtctgggacagacttcactctcaccatcagcagactggagcctgaagattttgcagtgtattactgtcagcagtatggtagctcacctcagacgttcggccaagggaccaaggtggaaatcaaacgaactgtggctgcaccatctgtcttcatcttcccgccatctgatgagcagttgaaatctggaactgcctctgttgtg

SEQ ID NO: 671 - DNA, 402 bp, Artificial Sequence
  J4 Light Chain
gagctcacactcacgcagtctccaggcaccctgtctttgtctccaggggaaagagccaccctctcctgcagggccagtcagagtgttagcagcagccacttagcctggtaccagcagaaacctggccaggctcccaggctcctcatctatggtgcatccagcagggccactggcatcccagacaggttcagtggcagtgggtctgggacagacttcactctcaccatcagcagactggagcctgaagattttgcagtgtattactgtcaacagtatggtagctcacctcagacgttcggccaagggaccgaggtggaaatcaaacgaactgtggctgcaccgtctgtcttcatcttcccgccatctgatgagcagttgaaatctggaactgcctctgttgtg

SEQ ID NO: 672 - DNA, 402 bp, Artificial Sequence
  K Light Chain
gagctcacgcagtctccaggcaccctgtctttgtctccaggggaaagagccaccctttcctgcagggccagtcagagtgttagcagcaactccttagcctggtaccaacagaaacctggcctggctcccaggctcctcatctatggtgcatccagcagggccactggcatcccagagaggttcagtggcagtggggctgggacaggcttcactctcaccatcagcacactggagcctgaagattttgcaatttattactgtcaacaatatggtggctcgcctccaagattcactttcggccctgggaccaaagtggatatcagacgaactgtggctgcaccatctgtcttcatcttcccgccatctgatgagcagttgaaatctggaactgcctctgttgtg

SEQ ID NO: 673 - DNA, 393 bp, Artificial Sequence
  L1 Light Chain
gagctcacgcagtctccaggcaccctgtcgttgtctccaggggaaagagccactctctcctgcagggccagtcagagtattaccagcaggtacttagcctggtaccagcagaaacctggccaggctcccaggctcctcatctatggtgcatccagcagggccactggcatcccagacaggttcagtggcagtgggtctgggacagacttcactctcaccatcagcagactggagcctgaagattttgcagtgtattactgtcagcagtatggtgactccgtcggtttcggccctgggaccaaagtggaaatcaaacgaactgtggctgcaccatctgtcttcatcttcccgccatctgatgagcagttgaaatctggaactgcctctgttgtg

SEQ ID NO: 674 - DNA, 393 bp, Artificial Sequence; identical to SEQ ID NO: 673
  L2 Light Chain

SEQ ID NO: 675 - DNA, 399 bp, Artificial Sequence
  L3 Light Chain
gagctcgtgatgacgcagtctccagccaccctgtctttgtctccaggggaaagagccaccctctcctgcagggccagtcagagtgttggcagctacttagcctggtaccaacagaaacctggccaggctcccaggctcctcatttatgatgcatccaacagggccactggcatcccagccaggttcagtggcagtgggtctgggacagacttcactctcaccatcagcagcctagagcctgaagattttgctgtgtatttttgtcagcagtatggtagctcacccttgacgttcggccaagggaccaaggtggaaatcaaacgaactgtggctgcaccatctgtcttcatcttcccgccatctgatgagcagttgaaatctggaactgcctctgttgtg

SEQ ID NO: 676 - DNA, 393 bp, Artificial Sequence
  L4 Light Chain
gagctcacgcagtctccaggcaccctgtctttgtctccaggggaaagagccaccctctcttgtagggccggtcagactgttgcgagcaattccttagcctggtatcagcacaaacctggccaggctcccaggctcctcatctatggtgcctccatcagggccagtggcatcccagacaggttcagtggcagtgggtctgggacagacttcactctcaccatcagcagactggagcctgaagattttgcagtgtattactgtcagcagtatggtctttcttccaccttcggccaagggacacgactggagattaaacgaactgtggctgcaccatctgtcttcatcttcccgccatctgatgagcagttgaaatctggaactgcctctgttgtg

SEQ ID NO: 677 - DNA, 390 bp, Artificial Sequence
  M Light Chain
gagctcacactcacgcagtctccaggcaccctgtctttgtctccaggggaaagagccaccctctcctgcagggccagtcagagtattaggagcagttacttagcctggtaccagcagaaacctggccaggctcccaggctcctcatctatgctgcagccagcagggccactggcatcccagacaggttcagtggcagtgggtctgggacagacttcactctcaccatcagcagactggagcctgaagattttgcagtgtatttctgtcatcactatggtggctcacctcggacgttcggccaagggaccaaggtggaaatcaaacgaacggtggctgcaccatctgtcttcatcttcccgccatctgatgagcagttgaaatctggaact

SEQ ID NO: 678 - DNA, 381 bp, Artificial Sequence
  YKns3a1 Heavy
ctgctcgagtcaggtccaggactggtgaagccctcgcagaccctctcactcacctgtgacatctccggggacagtgtctctagccatagtgctgcttggaactggatcaggcagtccccatcgagaggccttgagtggctgggaaggacatactacaggtccaactggtataatgattatagtgtttctgtgagaagtcgaataatcatcagcgcagacacatccaagaaccagttctccctgcagctgaactctgtgactcccgaggacacggctgtgtattattgtgcaagagatcgcttctacggtcccgggggtgacttgtactacggtctggacgtctggggccaagggaccacggtcaccgtctcctcagcctcc

SEQ ID NO: 679 - DNA, 381 bp, Artificial Sequence
  YKns3a2 Heavy
ctgctcgagtcaggtccaggactggtgaagccctcgcagaccctctcactcacctgtgacatctcgggggacagtgtctctagccatagtgctgcttggaactggatcaggcagtccccatcgagaggccttgagtggctgggaaggacatactacaggtccaactggtataatgattatagtgtttctgtgagaagtcgaataatcatcagcgcagacacatccaagaaccagctctccctgcagctgaactctgtgactcccgaggacacggctgtgtattattgtgcaagagatcgcttctacggtcccgggggtgacttgtactacggtctggacgtctggggccaagggaccacggtcaccgtctcctcagcctcc

SEQ ID NO: 680 - DNA, 381 bp, Artificial Sequence
  YKns3b1 Heavy
ctgctcgagtcaggtccaggactggtgaagccctcgcagaccctctcactcacctgtgacatctccggggacagtgtctctagcaacagtgctgcttggaactggatcaggcagtccccatcgagaggccttgagtggctgggaaggacattctacaggtccaactggtataatgattatgcagtatctgtgaaaagtcgaataaccatcaacccagacacatccaagaaccagttctccctgcagctgaactctgtgactcccgaggacacggctgtgtattactgtgcaagagatttatatattggcccaaccacagacttctactacggtatggacgtctggggccaagggaccacggtcaccgtctcctcagcctcc

SEQ ID NO: 681 - DNA, 381 bp, Artificial Sequence
  YKns3b2 Heavy
ctgctcgagtcaggtccaggactggtgaggccctcgcagaccctctcactcacctgtgacatctccggggacagtgtctctagcaacagtgctgcttggaactggatcaggcagtccccatcgagaggccttgagtggctgggaaggacattctacaggtccaactggtataatgattatgcagtatctgtgaaaagtcgaataaccatcaacccagacacatccaagaaccagttctccctgcagctgaactctgtgactcccgaggacacggctgtgtattactgtgcaagagatttatatattggcccaaccacagacttctactacggtatggacgtctggggccaagggaccacggtcaccgtctcctcagcctcc

SEQ ID NO: 682 - DNA, 381 bp, Artificial Sequence
  YKns3c Heavy
ctgctcgagtcaggtccaggactggtaaagccctcgcagaccctctcactcacctgtgccatctccggggacagtgtctctagcaacagtgctgcttggaactggatcaggcagtccccgtcgagaggccttgagtggctgggaaggacattctacaggtccaagtggtattatgattatgcagtatctgtgaaaagtcgaatcaccatcaacccagacacatccaagaaccagttctccctgcacctgaactctgtgactcccgaggacacggctgtgtattattgtgtaagagatttttatattggcccaaccagagacttctactacggtatggacgtctggggccaagggaccacggtcaccgtctcctcagcctcc

SEQ ID NO: 683 - DNA, 396 bp, Artificial Sequence
  YKns3a1 Light
gagctcacgcagtctccaggcaccctgtctttgtctccaggggaaagagccaccctctcctgcagggccagtcagagtgttagcagcagctacttagcctggtaccagcagaaacctggccaggctcccaggctcctcatctatggtgcatccagcagggccactggcatcccagacaggttcagtggcagtggatctgggacagacttcactctcaccatcagcagactggagcctgaagattttgcagtgtattactgtcaacagtatggtagctcacctcagacgttcggccaagggaccaaggtggaaatcaaacgaactgtggctgcaccatctgtcttcatcttcccgccatctgatgagcagttgaaatctggaactgcctctgttgtg

SEQ ID NO: 684 - DNA, 372 bp, Artificial Sequence
  YKns3a2 Light
gagctcacgcagtctccaggcaccctgtctttgtctccaggggaaagaggcaccctctcctgcagggccagtcagagtgttagcagcagctacttagcctggtaccagcagaaacctggccaggctcccaggctcctcatctatggtgcatccagcagggccactggcatcccagacaggttcagtggcagtgggtctgggacagacttcactctcaccatcagcagactggagcctgaagattttgcagtgtattactgtcagcagtatggtagctcacctcagacgttcggccaagggaccaaggtggaaatcaaacgaactgtggctgcaccatctgtcttcatcttcccgccatctgatgagcagtta

SEQ ID NO: 685 - protein, 8 aa, Artificial Sequence
  Flag Tag
DYKDDDDK

SEQ ID NO: 686 - DNA, 402 bp, Artificial Sequence
  YKns3b1 Light
gagctcacactcacgcagtctccaggcaccctgtctttgtctccaggggaaagagccaccctctcctgcagggccagtcagagtgttagcagcagctacttagcctggtaccagcagaaacctggccaggctcccaggctcctcatctatggtgcatccagcagggccactggcatcccagacaggttcagtggcagtgggtctgggacagacttcactctcaccatcagcagactggagcctgaagattttgcagtgtattactgtcagcagtatggtagctcacctcagacgttcggccaagggaccaaggtggaaatcaagcgaactgtggctgcaccatctgtcttcatcttcccgccatctgatgagcagttgaaatctggaactgcttctgttgtg

SEQ ID NO: 687 - protein, 9 aa, Artificial Sequence
  HA Tag
YPYDVPDYA

SEQ ID NO: 688 - protein, 10 aa, Artificial Sequence
  Myc tag
EQKLISEEDL

SEQ ID NO: 689 - DNA, 381 bp, Artificial Sequence; identical to SEQ ID NO: 678
  YKns3a1 Heavy

SEQ ID NO: 690 - DNA, 381 bp, Artificial Sequence; identical to SEQ ID NO: 679
  YKns3a1 Heavy

SEQ ID NO: 691 - DNA, 381 bp, Artificial Sequence; identical to SEQ ID NO: 680
  YKns3b1 Heavy

SEQ ID NO: 692 - DNA, 381 bp, Artificial Sequence; identical to SEQ ID NO: 681
  YKns3b2 Heavy

SEQ ID NO: 693 - DNA, 381 bp, Artificial Sequence; identical to SEQ ID NO: 682
  YKns3c Heavy

SEQ ID NO: 694 - protein, 29 aa, Artificial Sequence
  E2 396-424
TAGLVGLLTPGAKQNIQLINTNGSWHINS

SEQ ID NO: 695 - protein, 12 aa, Artificial Sequence
  E2 436-447
GWLAGLFYQHKF

SEQ ID NO: 696 - protein, 18 aa, Artificial Sequence
  E2 523-540
GAPTYSWGANDTDVFVLN

SEQ ID NO: 697 - DNA, 18 bp, Artificial Sequence
  HCV1aOuterR primer
gggatgctgcattgagta

SEQ ID NO: 698 - DNA, 19 bp, Artificial Sequence
  T-149-F primer
tgcggaaccggtgagtaca

SEQ ID NO: 699 - DNA, 21 bp, Artificial Sequence
  T-342-R primer
aggtttaggattcgtgctcat

SEQ ID NO: 700 - DNA, 27 bp, Artificial Sequence
  6-FAM18 primer
caccctatcaggcagtaccacaaggcc

SEQ ID NO: 701 - protein, 239 aa, Artificial Sequence
  KP S9 cloned variant E2 384-622
ETHVTGGATAHGASVLASLLTTGAKQNIQLINTNGSWHINRTALNCNDSLHTGFIAGLFYYNKFNSSGCPERLASCRRLDDFAQGWGPISHVNVSGPGERPYCWHYPPRPCGIVPARDVCGPVYCFTPSPVVVGTTDRAGAPTYNWGANETDVFVLNNTRPPLGNWFGCTWMNSTGFTKVCGAPPCVIGGVGNNTLRCPTDCFRKHPDATYSRCGSGPWITPRCLVDYPYRLWHYPCTI

SEQ ID NO: 702 - protein, 239 aa, Artificial Sequence
  KP R14 cloned variant E2 384-622
ETHVTGGATAHGASVLASLLTTGAKQNIQLINTNGSWHINRTALNCNDSLHTGFIAGLFYYNKFNSSGCPERLAGCRRLDDFAQGWGPISHVNVSGPGERPYCWHYPPRPCGIVPARDVCGPVYCFTPSPVVVGTTDRAGAPTYNWGANETDVFVLNNTRPPLGNWFGCTWMNSTGFTKVCGAPPCVIGGVGNNTLRCPTDCFRKHPDATYSRCGSGPWITPRCLVDYPYRLWHYPCTI

SEQ ID NO: 703 - protein, 239 aa, Artificial Sequence
  KP S6 cloned variant E2 384-622
ETHVTGGATAHGASVLASLLTTGAKQNIQLINTNGSWHINRTALNCNDSLHTGFIAGLFYYNKFNSSGCPERLASCRRLDDFAQGWGPISHVNVSGPGERPYCWHYPPRPCGIVPARDVCGPVYCFTPSPVVVGTTDRAGAPSYNWGANETDVFVLNNTRPPLGNWFGCTWMNSTGFTKVCGAPPCVIGGVGNNTLRCPTDCFRKHPDATYSRCGSGPWITPRCLVDYPYRLWHYPCTI

SEQ ID NO: 704 - protein, 239 aa, Artificial Sequence
  KP S18 cloned variant E2 384-622
ETHVTGGATAHGASVLASLLTTGAKQNIQLINTNGSWHINRTALNCNDSLHTGFIAGLFYYNKFNSSGCPERLASCRRLDDFAQGWGPISHVNVSGPGERPYCWHYPPRPCGIVPARDVCGPVYCFTPSPVVVGTTDRAGAPTYNWGANETDVFVLNNTRPPLGNWFGCTWMDSTGFTKVCGAPPCVIGGVGNNTLRCPTDCFRKHPDATYSRCGSGPWITPRCLVDYPYRLWHYPCTI

SEQ ID NO: 705 - protein, 239 aa, Artificial Sequence
  KP S16 cloned variant E2 384-622
ETHVTGGATAHGASVLASLLTTGAKQNIQLINTNGSWHINRTALNCNDSLHTGFIAGLFYYNKFNSSGCPERLASCRRLDDFAQGWGPISHVNVSGPGERPYCWHYPPRPCGIVPARDVCGPVYCFTPSPVVVGTTDRAGAPTYNWGANETDVFVLNNTRPPLGNWFGCTWMNSTGFTKVCGALPCVIGGVGNNTLRCPTDCFRKHPDATYSRCGSGPWITPRCLVDYPYRLWHYPCTI

SEQ ID NO: 706 - protein, 239 aa, Artificial Sequence
  KP R8 cloned variant E2 384-622
ETHVTGGATAHGASVLASLLTTGAKQNIQLINTNGSWHINRTALNCNDSLHTGFIAGLFYYNKFNSSGCPERLASCRRLDDFAQGWGPISHVNVSGPGERPYCWHYPPRPCGIVPARDVCGPVYCFTPSPVVVGTTDRAGAPTYNWGANETDVFVLNNTRPPLGNWFGCTWMNSTGFTKVCGAPPCVIGGVGSNTLRCPTDCFRKHPDATYSRCGSGPWITPRCLVDYPYRLWHYPCTI

SEQ ID NO: 707 - protein, 239 aa, Artificial Sequence
  KP S20 cloned variant E2 384-622
ETHVTGGATAHGASVLASLLTTGAKQNIQLINTNGSWHVNRTALNCNDSLHTGFIAGLFYYNKFNSSGCPERLASCRRLDDFAQGWGPISHVNVSGPGERPYCWHYPPRPCGIVPARDVCGPVHCFTPSPVVVGTTDRAGAPTYNWGANETDVFVLNNTRPPLGNWFGCTWMNSTGFTKVCGAPPCVIGGVGNNTLRCPTDCFRKHPDATYSRCGSGPWITPRCLVDYPYRLWHYPCTI

SEQ ID NO: 708 - protein, 239 aa, Artificial Sequence
  KP S4 cloned variant E2 384-622
ETHVTGGATAHGASVLASLLTTGAKQNIQLINTNGSWHINRTALNCNDSLHTGFIVGLFYYNKFNSSGCPERLASCRRLDDFAQGWGPISYVNVSGPGERPYCWHYPPRPCGIVPARDVCGPVYCFTPSPVVVGTTDRAGAPTYNWGANETDVFVLNNTRPPLGNWFGCTWMNSTGFTKVCGAPPCVIGGVGNNTLRCPTDCFRKHPDATYSRCGSGPWITPRCLVDYPYRLWHYPCTI

SEQ ID NO: 709 - protein, 239 aa, Artificial Sequence
  KP R3 cloned variant E2 384-622
ETHVTGGATAHGASVLASLLTTGAKQNIQLINTNGSWHINRTALNCNDSLHTGFIAGLFYYNKFDSSGCPERLASCRRLDDFAQGWGPISYVNVSGPGERPYCWHYPPRPCGIVPARDVCGPVYCFTPSPVVVGTTDRAGAPTYNWGANETDVFVLNNTRPPLGNWFGCTWMNSTGFTKVCGAPPCVIGGVGNNTLRCPTDCFRKHPDATYSRCGSGPWITPRCLVDYPYRLWHYPCTI

SEQ ID NO: 710 - protein, 239 aa, Artificial Sequence
  KP S3 cloned variant E2 384-622
ETHVTGGATAHGASVLASLLTTGAKQNIQLINTNGSWHINRTALNCNDSLHTGFIAGLFYYNKFDSSGCPERLASCRRLDDFAQGWGPISYVNVSGPGERPYCWHYPPRPCGIVPARDVCGPVYCFTPSPVVVGTTDRAGAPTYNWGANETDVFVLNNTRPPLGNWFGCTWMNSTGFTKVCGAPPCDIGGVGNNTLRCPTDCFRKHPDATYSRCGSGPWITPRCLVDYPYRLWHYPCTI

SEQ ID NO: 711 - protein, 239 aa, Artificial Sequence
  KP S12 cloned variant E2 384-622
ETHVTGGATAHGASVLASLLTPGAKQHVQLINTNGSWHINRTALNCNDSLHTGFIAGLFYYNKFDSSGCPERLASCRRLDDFAQGWGPISYVNVSGPGERPYCWHYPPRPCGIVPARDVCGPVYCFTPSPVVVGTTDRAGAPTYNWGANETDVFVLNNTRPPLGNWFGCTWMNSTGFTKVCGAPPCVIGGVGNNTLRCPTDCFRKHPDATYSRCGSGPWITPRCLVDYPYRLWHYPCTI

SEQ ID NO: 712 - protein, 239 aa, Artificial Sequence
  KP S15 cloned variant E2 384-622
ETHVTGGATAHGASVLASLLTPGAKQNIQLINTNGSWHINRTALNCNDSLHTGFVAGLFYYNKFDSSGCPERLASCRRLDDFAQGWGPISHVNVSGPGERPYCWHYPPRPCGIVPARDVCGPVYCFTPSPVVVGTTDRAGAPTYNWGANETDVFVLNNTRPPLGNWFGCTWMNSTGFTKVCGAPPCVIGGVGNNTLRCPTDCFRKHPDATYSRCGSGPWITPRCLVDYPYRLWHYPCTI

SEQ ID NO: 713 - protein, 239 aa, Artificial Sequence
  KP S5 cloned variant E2 384-622
ETHVTGGATAHGASVLASLLTPGAKQNIQLINTNGSWHINRTALNCNDSLHTGFIAGLFYYNKFDSSGCLERLASCRRLDDFAQGWGPISHVNVSGPGERPYCWHYPPRPCGIVPARDVCGPVYCFTPSPVVVGTTDRAGAPTYNWGANETDVFVLNNTRPPLGNWFGCTWMNSTGFTKVCGAPPCAIGGVGNNTLRCPTDCFRKHPDATYSRCGSGPWITPRCLVDYPYRLWHYPCTI

SEQ ID NO: 714 - protein, 239 aa, Artificial Sequence
  KP R7 cloned variant E2 384-622
ETHVTGGATAHGASVLASLLTPGAKQNIQLINTNGSWHINRTALNCNDSLHTGFIAGLFYYNKFNSSGCPERLASCRRLDDFAQGWGPISHVNVSGPGERPYCWHYPPRPCGIVPARDVCGPVYCFTPSPVVVGTTDRAGAPTYNWGANETDVFVLNNTRPPLGNWFGCTWMNSTGFTKVCGAPPCAIGGVGNNTLRCPTDCFRKHPDATYSRCGSGPWITPRCLVDYPYRLWHYPCTI

SEQ ID NO: 715 - protein, 239 aa, Artificial Sequence
  KP R11 cloned variant E2 384-622
ETHVTGGATAHGASVLASLLTPGAKQNIQLINTNGSWHINRTALNCNDSLHTGFIAGLFYYNKFNSSGCPERLASCRRLDDFAQGWGPISHVNVSGPGERPYCWHYPPRPCGIVPARDVCGPVYCFTPSPVVVGTTDRAGAPTYNWGANETDVFVLNNTRPPLGNWFGCTWMNTTGFTKVCGAPSCVIGGVGNNTLRCPTDCFRKHPDATYSRCGSGPWITPRCLVDYPYRLWHYPCTI

SEQ ID NO: 716 - protein, 239 aa, Artificial Sequence
  KP R1 cloned variant E2 384-622
ETHVTGGATAHGASVLASLLTPGAKQNIQLINTNGSWHINRTALNCNDSLHTGFIAGLFYYNKFNSSGCPERLASCRRLDDFAQGWGPISHVNVSGPGERPYCWHYPPRPCGIVPARDVCGPVYCFTPSPVVVGTTDRAGAPTYNWGANETDVFVLNNTRPPLGNWFGCTWMNTTGFTKVCGAPPCVIGGVGNNTLRCPTDCFRKHPDATYSRCGSGPWITPRCLVDYPYRLWHYPCTI

SEQ ID NO: 717 - protein, 239 aa, Artificial Sequence
  KP R12 cloned variant E2 384-622
ETHVTGGATAHGASVLASLLTPGAKQNIQLINTNGSWHINRTALNCNDSLHTGFIAGLFYYNKFNSSGCPERLASCRRLDDFAQGWGPISHVNVSGPGERPYCWHYPPRPCGIVPARDVCGPVYCFTPSPVVVGTTDRAGAPTYNWGANETDVFVLNNTRPPLGNWFGCTWMNSTGFTKVCGAPPCVIGGVGNNTLRCPTDCFRKHPDATYSRCGSGPWITPRCLVDYPYRLWHYPCTI

SEQ ID NO: 718 - protein, 239 aa, Artificial Sequence
  KP S7 cloned variant E2 384-622
ETHVTGGATAHGASVLASLLTPGAKQNIQLINTNGSWHINRTALNCNDSLHTGFIAGLFYYNKFNSSGCPERLASCRRLDDFAQGWGPISHVNVSGPGERPYCWHYPPRPCGIVPARDVCGPVYCFTPSPVVVGTTDRAGAPTYNWGANETDVFVLNNTRPPLGNWFGCTWMNSTGFTKVCGAPPCVIGGVGNNTLRCPTDCFRKHPDATYSRCGSGPCITPRCLVDYPYRLWHYPCTI

SEQ ID NO: 719 - protein, 239 aa, Artificial Sequence
  KP R15 cloned variant E2 384-622
ETHVTGGATAHGASVLTSLLTTGAKQNIQLINTNGSWHINRTALNCNDSLHTGFIAGLFYYNKFNSSGCPERLASCRRLDDFAQGWGPISHVNVSGPGERPYCWHYPPRPCGIVPARDVCGPVYCFTPSPVVVGTTDRAGAPTYNWGANETDIFVLNNTRPPLGNWFGCTWMNSTGFTKVCGAPPCVIGGVGNNTLRCPTDCFRKHPDATYSRCGSGPWITPRCLVDYPYRLWHYPCTI

SEQ ID NO: 720 - protein, 239 aa, Artificial Sequence
  KP R18 cloned variant E2 384-622
ETYVTGGATAHGASVLASLLTTGAKQNIQLINTNGSWHINRTALNCNDSLHTGFIAGLFYYNKFNSSGCPERLASCRRLDDFAQGWGPISHVNVSGPGERPYCWHYPPRPCGIVPARDVCGPVYCFTPSPVVVGTTDRAGAPTYNWGANETDVFVLNNTRPPLGNWFGCTWMNSTGFTKVCGAPPCVIGGVGNNTLRCPTDCFRKHPDATYSRCGSGPWITPRCLVDYPYRLWHYPCTI

SEQ ID NO: 721 - protein, 239 aa, Artificial Sequence
  KP S11 cloned variant E2 384-622
ETHVTGGATAHGASVFASLLTTGAKQNIQLINTNGSWHINRTALNCNDSLHTGFIAGLFYYNKFNSSGCPERLASCRRLDDFAQGWGPISHVNVSGPGERPYCWHYPPRPCGIVPARDVCGPVYCFTPSPVVVGTTDRAGAPTYNWGANETDVFVLNNTRPPLGNWFGCTWMNSTGFTKVCGAPPCVIGGVGNNTLRCPTDCFRKHPDATYSRCGSGPWITPRCLVDYPYRLWHYPCTI

SEQ ID NO: 722 - protein, 239 aa, Artificial Sequence
  KP R20 cloned variant E2 384-622
ETHVTGGATAHGASVFASLLTTGAKQNIQLINTNGSWHINRTALNCNDSLHTGFIAGLFYYNKFDSSGCPERLASCRRLDDFAQGWGPISHVNVSGPGERPYCWHYPPRPCGIVPARDVCGPVYCFTPSPVVVGTTDRAGAPTYNWGANETDVFVLNNTRPPLGNWFGCTWMNSTGFTKVCGAPPCVIGGVGNNTLRCPTDCFRKHPDATYSRCGSGPWITPRCLVDYPYRLWHYPCTI

SEQ ID NO: 723 - protein, 239 aa, Artificial Sequence
  isolate H77
ETHVTGGSAGRTTAGLVGLLTPGAKQNIQLINTNGSWHINSTALNCNESLNTGWLAGLFYQHKFNSSGCPERLASCRRLTDFAQGWGPISYANGSGLDERPYCWHYPPRPCGIVPAKSVCGPVYCFTPSPVVVGTTDRSGAPTYSWGANDTDVFVLNNTRPPLGNWFGCTWMNSTGFTKVCGAPPCVIGGVGNNTLLCPTDCFRKHPEATYSRCGSGPWITPRCMVDYPYRLWHYPCTI

SEQ ID NO: 724 - protein, 239 aa, Artificial Sequence
  isolate UKN1b12.16
RTRTTGGSAAQTTYGLTSLFRSGPSQKIQLVNTNGSWHINRTALNCNDSLNTGFLAALFYVRNFNSSGCPERMASCRPIDTFDQGWGPITYTEPHSLDQRPYCWHYAPQPCGIVPAAQVCGPVYCFTPSPVVVGTTDRFGAPTYTWGENETDVLILNNTRPPQGNWFGCTWMNGTGFTKTCGGPPCNIGGAGNNTLICPTDCFRKHPEATYTRCGSGPWLTPRCMVDYPYRLWHYPCTV

SEQ ID NO: 725 - protein, 5 aa, Artificial Sequence
  N1 CDRH1
TTWIG

SEQ ID NO: 726 - protein, 5 aa, Artificial Sequence
  N2 CDRH1
TTWIG

SEQ ID NO: 727 - protein, 5 aa, Artificial Sequence
  N4 CDRH1
TTWIG

SEQ ID NO: 728 - protein, 5 aa, Artificial Sequence
  O1 CDRH1
DYWIA

SEQ ID NO: 729 - protein, 5 aa, Artificial Sequence
  P1 CDRH1
SFTMH

SEQ ID NO: 730 - protein, 5 aa, Artificial Sequence
  P2 CDRH1
TFTMH

SEQ ID NO: 731 - protein, 5 aa, Artificial Sequence
  P3 CDRH1
TFAMH

SEQ ID NO: 732 - protein, 5 aa, Artificial Sequence
  P4 CDRH1
TFTMH

SEQ ID NO: 733 - protein, 5 aa, Artificial Sequence
  P5 CDRH1
TFTMH

SEQ ID NO: 734 - protein, 5 aa, Artificial Sequence
  P6 CDRH1
TFTMH

SEQ ID NO: 735 - protein, 5 aa, Artificial Sequence
  Q1 CDRH1
NNGLN

SEQ ID NO: 736 - protein, 5 aa, Artificial Sequence
  Q2 CDRH1
NNGLN

SEQ ID NO: 737 - protein, 5 aa, Artificial Sequence
  R1 CDRH1
IYGVA

SEQ ID NO: 738 - protein, 5 aa, Artificial Sequence
  S1 CDRH1
SFGIS

SEQ ID NO: 739 - protein, 5 aa, Artificial Sequence
  T1 CDRH1
RFWMH

SEQ ID NO: 740 - protein, 5 aa, Artificial Sequence
  U1 CDRH1
TQAMS

SEQ ID NO: 741 - protein, 5 aa, Artificial Sequence
  V1 CDRH1
NFGIS

SEQ ID NO: 742 - protein, 26 aa, Artificial Sequence
  N1 CDRH2
IINPGDSSTNIYPGDSATRYGPSFQG

SEQ ID NO: 743 - protein, 26 aa, Artificial Sequence
  N2 CDRH2
IINPGDSSTNIYPGDSATRYGPSFQG

SEQ ID NO: 744 - protein, 26 aa, Artificial Sequence
  N3 CDRH2
IINPGDSATNIYPGDSDTRYGPSFQG

SEQ ID NO: 745 - protein, 26 aa, Artificial Sequence
  N4 CDRH2
IINPGDSSTNIYPGDSATRYGPSFQG

SEQ ID NO: 746 - protein, 27 aa, Artificial Sequence
  O1 CDRH2
IIYPDDSDTKYSPSFQGQVTISADKSI

SEQ ID NO: 747 - protein, 17 aa, Artificial Sequence
  P1 CDRH2
LISHDGSNKDYADSVRG

SEQ ID NO: 748 - protein, 17 aa, Artificial Sequence
  P2 CDRH2
LISHDANNKDYADSVKG

SEQ ID NO: 749 - protein, 17 aa, Artificial Sequence
  P3 CDRH2
LTSHDGSRQDYADSVRG

SEQ ID NO: 750 - protein, 17 aa, Artificial Sequence
  P4 CDRH2
VISHDGGTEHYADSVTG

SEQ ID NO: 751 - protein, 17 aa, Artificial Sequence
  P5 CDRH2
VISHDGGTEHYADSVTG

SEQ ID NO: 752 - protein, 17 aa, Artificial Sequence
  P6 CDRH2
VISHDGGTEHYADSVTG

SEQ ID NO: 753 - protein, 17 aa, Artificial Sequence
  Q1 CDRH2
WISPYNGDTDFAHKFQG

SEQ ID NO: 754 - protein, 17 aa, Artificial Sequence
  Q2 CDRH2
WISPYNGDTDFAHKFQG

SEQ ID NO: 755 - protein, 17 aa, Artificial Sequence
  R1 CDRH2
WISPQNGDTHSPQKFQG

SEQ ID NO: 756 - protein, 17 aa, Artificial Sequence
  S1 CDRH2
RIDTYNGKTNYAQKLQG

SEQ ID NO: 757 - protein, 17 aa, Artificial Sequence
  T1 CDRH2
RINSDGSSTTYADSVKG

SEQ ID NO: 758 - protein, 17 aa, Artificial Sequence
  U1 CDRH2
GITPIFGTVNYAQKILG

SEQ ID NO: 759 - protein, 17 aa, Artificial Sequence
  V1 CDRH2
WINTYNGKTTYAQSLQG

SEQ ID NO: 760 - protein, 25 aa, Artificial Sequence
  N1 CDRH3
HVPVPISGTFLWREREMHDFGYFDD

SEQ ID NO: 761 - protein, 25 aa, Artificial Sequence
  N2 CDRH3
HVPVPISGTFLWREREMHDFGYFDD

SEQ ID NO: 762 - protein, 25 aa, Artificial Sequence
  N3 CDRH3
HVPVPISGTFLWREREMHDLGYFDD

SEQ ID NO: 763 - protein, 25 aa, Artificial Sequence
  N4 CDRH3
HVPVPISGTFLWREREMHDFGYFDD

SEQ ID NO: 764 - protein, 18 aa, Artificial Sequence
  O1 CDRH3
GCLGAKCYYPHYYYGLDV

SEQ ID NO: 765 - protein, 22 aa, Artificial Sequence
  P1 CDRH3
GGPAYYTYSDTLTGYHNVVGDY

SEQ ID NO: 766 - protein, 22 aa, Artificial Sequence
  P2 CDRH3
GGPAYYLYSDVLTGFHNVVGDY

SEQ ID NO: 767 - protein, 22 aa, Artificial Sequence
  P3 CDRH3
GGPAYYTYNDVLTGYAYVVGDF

SEQ ID NO: 768 - protein, 22 aa, Artificial Sequence
  P4 CDRH3
GGPAYYLYNDVLTGYYNVVGDF

SEQ ID NO: 769 - protein, 22 aa, Artificial Sequence
  P5 CDRH3
GGPAYYLYNDVLTGYYNVVGDF

SEQ ID NO: 770 - protein, 22 aa, Artificial Sequence
  P6 CDRH3
GGPAYYLYNDVLTGYYNVVGDF

SEQ ID NO: 771 - protein, 23 aa, Artificial Sequence
  Q1 CDRH3
DRNSAGGTWLFRDPPPGSTFFDS

SEQ ID NO: 772 - protein, 23 aa, Artificial Sequence
  Q2 CDRH3
DRNSAGGTWLFRDPPPGSTFFDS

SEQ ID NO: 773 - protein, 16 aa, Artificial Sequence
  R1 CDRH3
DYGVNFGGGSEHNLDY

SEQ ID NO: 774 - protein, 22 aa, Artificial Sequence
  S1 CDRH3
DDCRSSTCYLAQHNWQAYYHDS

SEQ ID NO: 775 - protein, 14 aa, Artificial Sequence
  T1 CDRH3
GGDSSSPYYYPMDV

SEQ ID NO: 776 - protein, 17 aa, Artificial Sequence
  U1 CDRH3
EVNLKTWNLAHPNVFDV

SEQ ID NO: 777 - protein, 15 aa, Artificial Sequence
  V1 CDRH3
ENEGEYVWGHFRSDY

SEQ ID NO: 778 - protein, 12 aa, Artificial Sequence
  N1 CDRL1
RASQSVSSSYLA

SEQ ID NO: 779 - protein, 12 aa, Artificial Sequence
  N2 CDRL1
RASQSILGRYLA

SEQ ID NO: 780 - protein, 12 aa, Artificial Sequence
  N3 CDRL1
RASQSVSSSYLA

SEQ ID NO: 781 - protein, 12 aa, Artificial Sequence
  N4 CDRL1
RASQSVSNNYLA

SEQ ID NO: 782 - protein, 11 aa, Artificial Sequence
  O1 CDRL1
RATQGIDNYLN

SEQ ID NO: 783 - protein, 10 aa, Artificial Sequence
  P1 CDRL1
RASQVRGFLA

SEQ ID NO: 784 - protein, 12 aa, Artificial Sequence
  P1a CDRL1
RTSQSVSSTYLA

SEQ ID NO: 785 - protein, 12 aa, Artificial Sequence
  P2 CDRL1
RASQSVSSSYLA

SEQ ID NO: 786 - protein, 12 aa, Artificial Sequence
  P3 CDRL1
RASQSVSSTYLA

SEQ ID NO: 787 - protein, 12 aa, Artificial Sequence
  P4 CDRL1
RASQSVSSSNLA

SEQ ID NO: 788 - protein, 11 aa, Artificial Sequence
  P5 CDRL1
RASQSVGTYFA

SEQ ID NO: 789 - protein, 12 aa, Artificial Sequence
  P6 CDRL1
RASQSVSSSNLA

SEQ ID NO: 790 - protein, 12 aa, Artificial Sequence
  Q1 CDRL1
RASQSVSSSYLA

SEQ ID NO: 791 - protein, 11 aa, Artificial Sequence
  Q2 CDRL1
RASRGVNSNLA

SEQ ID NO: 792 - protein, 16 aa, Artificial Sequence
  R1 CDRL1
RSSYSLLHINGYKYLD

SEQ ID NO: 793 - protein, 12 aa, Artificial Sequence
  S1 CDRL1
RASQSVSSSYLA

SEQ ID NO: 794 - protein, 12 aa, Artificial Sequence
  T1 CDRL1
RASQSVSSSYLA

SEQ ID NO: 795 - protein, 11 aa, Artificial Sequence
  U1 CDRL1
RASQSISSFLN

SEQ ID NO: 796 - protein, 11 aa, Artificial Sequence
  V1 CDRL1
QASQDISNFLN

SEQ ID NO: 797 - protein, 7 aa, Artificial Sequence
  N1 CDRL2
GASNRAA

SEQ ID NO: 798 - protein, 7 aa, Artificial Sequence
  N2 CDRL2
GASKRAT

SEQ ID NO: 799 - protein, 7 aa, Artificial Sequence
  N3 CDRL2
GASSRAT

SEQ ID NO: 800 - protein, 7 aa, Artificial Sequence
  N4 CDRL2
GASSRAT

SEQ ID NO: 801 - protein, 7 aa, Artificial Sequence
  O1 CDRL2
GASSLQS

SEQ ID NO: 802 - protein, 7 aa, Artificial Sequence
  P1 CDRL2
GASNRAP

SEQ ID NO: 803 - protein, 7 aa, Artificial Sequence
  P1a CDRL2
GASNRAP

SEQ ID NO: 804 - protein, 7 aa, Artificial Sequence
  P2 CDRL2
GASSRAT

SEQ ID NO: 805 - protein, 7 aa, Artificial Sequence
  P3 CDRL2
GASSRAT

SEQ ID NO: 806 - protein, 7 aa, Artificial Sequence
  P4 CDRL2
GASNRAP

SEQ ID NO: 807 - protein, 7 aa, Artificial Sequence
  P5 CDRL2
GASNRAT

SEQ ID NO: 808 - protein, 7 aa, Artificial Sequence
  P6 CDRL2
GASNRAP

SEQ ID NO: 809 - protein, 7 aa, Artificial Sequence
  Q1 CDRL2
GASSRAT

SEQ ID NO: 810 - protein, 7 aa, Artificial Sequence
  Q2 CDRL2
SASTRAT

SEQ ID NO: 811 - protein, 7 aa, Artificial Sequence
  R1 CDRL2
LGSNRAP

SEQ ID NO: 812 - protein, 7 aa, Artificial Sequence
  S1 CDRL2
GASSRAT

SEQ ID NO: 813 - protein, 7 aa, Artificial Sequence
  T1 CDRL2
GASSRAT

SEQ ID NO: 814 - protein, 7 aa, Artificial Sequence
  U1 CDRL2
AASSLQS

SEQ ID NO: 815 - protein, 7 aa, Artificial Sequence
  V1 CDRL2
DATHLET

SEQ ID NO: 816 - protein, 9 aa, Artificial Sequence
  N1 CDRL3
QQYGSSLIT

SEQ ID NO: 817 - protein, 8 aa, Artificial Sequence
  N2 CDRL3
QHYGSSIT

SEQ ID NO: 818 - protein, 8 aa, Artificial Sequence
  N3 CDRL3
QQYGSSLT

SEQ ID NO: 819 - protein, 9 aa, Artificial Sequence
  N4 CDRL3
QQYGSSSIT

SEQ ID NO: 820 - protein, 10 aa, Artificial Sequence
  O1 CDRL3
QQSYSTPPET

SEQ ID NO: 821 - protein, 10 aa, Artificial Sequence
  P1 CDRL3
QQYGDSPPIT

SEQ ID NO: 822 - protein, 10 aa, Artificial Sequence
  P1a CDRL3
QQYGDSPPIT

SEQ ID NO: 823 - protein, 9 aa, Artificial Sequence
  P2 CDRL3
QQYGDSPPF

SEQ ID NO: 824 - protein, 9 aa, Artificial Sequence
  P3 CDRL3
QQYGSSPLT

SEQ ID NO: 825 - protein, 10 aa, Artificial Sequence
  P4 CDRL3
QRYGDSPPIT

SEQ ID NO: 826 - protein, 8 aa, Artificial Sequence
  P5 CDRL3
QQYGSSPT

SEQ ID NO: 827 - protein, 10 aa, Artificial Sequence
  P6 CDRL3
QRYGDSPPIT

SEQ ID NO: 828 - protein, 9 aa, Artificial Sequence
  Q1 CDRL3
QQYGSSPQT

SEQ ID NO: 829 - protein, 10 aa, Artificial Sequence
  Q2 CDRL3
QQYDDTPQIT

SEQ ID NO: 830 - protein, 9 aa, Artificial Sequence
  R1 CDRL3
MQSLQAPWT

SEQ ID NO: 831 - protein, 9 aa, Artificial Sequence
  S1 CDRL3
QQYGSSPQT

SEQ ID NO: 832 - protein, 9 aa, Artificial Sequence
  T1 CDRL3
QQYGSSPQT

SEQ ID NO: 833 - protein, 9 aa, Artificial Sequence
  U1 CDRL3
QQSYSTPRT

SEQ ID NO: 834 - protein, 10 aa, Artificial Sequence
  V1 CDRL3
QHFDDVPSFT

SEQ ID NO: 835 - protein, 31 aa, Artificial Sequence
  N1 Heavy FW1
EVQLLEQSGPEVKKPGDSLRISCKMSGDSLV

SEQ ID NO: 836 - protein, 31 aa, Artificial Sequence; identical to SEQ ID NO: 835
  N2 Heavy FW1

SEQ ID NO: 837 - protein, 31 aa, Artificial Sequence
  N3 Heavy FW1
EVQLLEQSGAEVKKPGDSLRISCKMSGDSLV

SEQ ID NO: 838 - protein, 31 aa, Artificial Sequence; identical to SEQ ID NO: 835
  N4 Heavy FW1

SEQ ID NO: 839 - protein, 31 aa, Artificial Sequence
  O1 Heavy FW1
EVQLLEQSGAEVKKAGESVRLSCKASGYRFG

SEQ ID NO: 840 - protein, 30 aa, Artificial Sequence
  P1 Heavy FW1
EVQLLESGGGVVQPGGSLRLSCAASGFTFT

SEQ ID NO: 841 - protein, 30 aa, Artificial Sequence
  P2 Heavy FW1
EVQLLESGGGVVQPGRSLRLSCAASGFTLD

SEQ ID NO: 842 - protein, 30 aa, Artificial Sequence
  P3 Heavy FW1
EVQLLESGGGVVQPGKSLRLSCAVSGFTLN

SEQ ID NO: 843 - protein, 30 aa, Artificial Sequence
  P4 Heavy FW1
EVQLLESGGGVVQPGKSLTVSCAASGFTFS

SEQ ID NO: 844 - protein, 30 aa, Artificial Sequence; identical to SEQ ID NO: 843
  P5 Heavy FW1

SEQ ID NO: 845 - protein, 30 aa, Artificial Sequence; identical to SEQ ID NO: 843
  P6 Heavy FW1

SEQ ID NO: 846 - protein, 31 aa, Artificial Sequence
  Q1 Heavy FW1
EVQLLEQSGAEVRKPGASVKVSCKASGYTFT

SEQ ID NO: 847 - protein, 31 aa, Artificial Sequence
  Q2 Heavy FW1
EVQLLEQSGAEVKKPGASVKVSCKASGYTFT

SEQ ID NO: 848 - protein, 31 aa, Artificial Sequence
  R1  Heavy FW1
EVQLLEQSGAEVKKPGASVKVSCKASGYTFS

SEQ ID NO: 849 - protein, 31 aa, Artificial Sequence
  S1 Heavy FW1
EVQLLEQSGAEVKKPGTSVKVSCTASGYIFT

SEQ ID NO: 850 - protein, 30 aa, Artificial Sequence
  T1 Heavy FW1
EVQLLESGGGLVQPGGSLRLSCAASGFTFS

SEQ ID NO: 851 - protein, 31 aa, Artificial Sequence
  U1 Heavy FW1
EVQLLEQSGPEVKRPGTSVKMSCKISGGASI

SEQ ID NO: 852 - protein, 31 aa, Artificial Sequence
  V1 Heavy FW1
EVQLLEQSGAEVQKPGASVKVSCKPSGYIFT

SEQ ID NO: 853 - protein, 14 aa, Artificial Sequence
  N1 Heavy FW2
WVRQKPGQGLEWMG

SEQ ID NO: 854 - protein, 14 aa, Artificial Sequence
  N2 Heavy FW2
WVRQKPGQGLEWMG

SEQ ID NO: 855 - protein, 14 aa, Artificial Sequence
  N3 Heavy FW2
WVRQKPGQGLEWMG

SEQ ID NO: 856 - protein, 14 aa, Artificial Sequence
  N4 Heavy FW2
WVRQKPGQGLEWMG

SEQ ID NO: 857 - protein, 14 aa, Artificial Sequence
  O1 Heavy FW2
WVRQLPGRAPEWMG

SEQ ID NO: 858 - protein, 14 aa, Artificial Sequence
  P1 Heavy FW2
WVRQAPGKGLEWVA

SEQ ID NO: 859 - protein, 14 aa, Artificial Sequence
  P2 Heavy FW2
WVRQSPGKGLEWVA

SEQ ID NO: 860 - protein, 14 aa, Artificial Sequence
  P3 Heavy FW2
WVRQVPGKGLEWVA

SEQ ID NO: 861 - protein, 14 aa, Artificial Sequence
  P4 Heavy FW2
WVRQAPGKWLEWVA

SEQ ID NO: 862 - protein, 14 aa, Artificial Sequence
  P5 Heavy FW2
WVRQAPGKGLEWVA

SEQ ID NO: 863 - protein, 14 aa, Artificial Sequence
  P6 Heavy FW2
WVRQAPGKWLEWVA

SEQ ID NO: 864 - protein, 14 aa, Artificial Sequence
  Q1 Heavy FW2
WVRQAPGQGLEWMG

SEQ ID NO: 865 - protein, 14 aa, Artificial Sequence
  Q2 Heavy FW2
WVRQAPGQGLEWMG

SEQ ID NO: 866 - protein, 14 aa, Artificial Sequence
  R1 Heavy FW2
WVRQAPGQGLEWMG

SEQ ID NO: 867 - protein, 14 aa, Artificial Sequence
  S1 Heavy FW2
WVRQAPGQGLEWMG

SEQ ID NO: 868 - protein, 14 aa, Artificial Sequence
  T1 Heavy FW2
WVRQAPGKGLVWVA

SEQ ID NO: 869 - protein, 14 aa, Artificial Sequence
  U1 Heavy FW2
WVRQAPGQGLEWMG

SEQ ID NO: 870 - protein, 14 aa, Artificial Sequence
  V1 Heavy FW2
WVRQAPGQGLEWMA

SEQ ID NO: 871 - protein, 32 aa, Artificial Sequence
  N1 Heavy FW3
QVTISIDKSTSTAYLQWNAVKPSDTGIYYCAR

SEQ ID NO: 872 - protein, 32 aa, Artificial Sequence
  N2 Heavy FW3
QVTISIDKSTSTAYLQWNTVKPSDTGIYYCAR

SEQ ID NO: 873 - protein, 32 aa, Artificial Sequence
  N3 Heavy FW3
QVTISIDKSTSTAYLQWNAVKASDTGIYYCAR

SEQ ID NO: 874 - protein, 32 aa, Artificial Sequence
  N4 Heavy FW3
QVTISIDKSTSTAYLQWNNVKASDTGIYYCAR

SEQ ID NO: 875 - protein, 22 aa, Artificial Sequence
  O1 Heavy FW3
RTTFLDWGSLKASDTAIYYCAR

SEQ ID NO: 876 - protein, 32 aa, Artificial Sequence
  P1 Heavy FW3
RFTVSRDNSKKMVYLQMSSLRPDDAAVYYCAR

SEQ ID NO: 877 - protein, 32 aa, Artificial Sequence
  P2 Heavy FW3
RFTISRDNSKKLVYLQMDSLRSEDTAVYYCAR

SEQ ID NO: 878 - protein, 32 aa, Artificial Sequence
  P3 Heavy FW3
RFTISRDNSKSMVFLLMNSLRAEDTAVYYCVR

SEQ ID NO: 879 - protein, 32 aa, Artificial Sequence
  P4 Heavy FW3
RFTISRDNSKNTLHLQMNSLRPEDTAVYFCAR

SEQ ID NO: 880 - protein, 32 aa, Artificial Sequence; identical to SEQ ID NO: 879
  P5 Heavy FW3

SEQ ID NO: 881 - protein, 32 aa, Artificial Sequence
  P6 Heavy FW3
RFTISRDNSKNTLHMQMNSLRLEDTAVYFCAR

SEQ ID NO: 882 - protein, 32 aa, Artificial Sequence
  Q1 Heavy FW3
RISMTTDTSTNTAYMELRSLRSDDTAVYYCAR

SEQ ID NO: 883 - protein, 32 aa, Artificial Sequence; identical to SEQ ID NO: 882
  Q2 Heavy FW3

SEQ ID NO: 884 - protein, 32 aa, Artificial Sequence
  R1 Heavy FW3
RLTMTTDTSTSTAYMELRSLRSDDTAVYFCAR

SEQ ID NO: 885 - protein, 32 aa, Artificial Sequence
  S1 Heavy FW3
RVTMTTDTYTSTAYMELRSLTSDDTAVYYCAR

SEQ ID NO: 886 - protein, 32 aa, Artificial Sequence
  T1 Heavy FW3
RFTISRDNAKNTLYLQMNSLRDEDTAVYFCAR

SEQ ID NO: 887 - protein, 30 aa, Artificial Sequence
  U1 Heavy FW3
RVTITADEDTVSLELSSLKSEDTAVYYCAR

SEQ ID NO: 888 - protein, 32 aa, Artificial Sequence
  V1 Heavy FW3
RVTLTTDPYTNTVFMELRSLRSDDTAVYYCAR

SEQ ID NO: 889 - protein, 11 aa, Artificial Sequence
  N1 Heavy FW4
WGQGTLVIVSS

SEQ ID NO: 890 - protein, 11 aa, Artificial Sequence
  N2 Heavy FW4
WGQGTLVIVSS

SEQ ID NO: 891 - protein, 11 aa, Artificial Sequence
  N3 Heavy FW4
WGQGTLVIVSS

SEQ ID NO: 892 - protein, 11 aa, Artificial Sequence
  N4 Heavy FW4
WGQGTLVIVSS

SEQ ID NO: 893 - protein, 11 aa, Artificial Sequence
  O1 Heavy FW4
WGQGTTVIVSS

SEQ ID NO: 894 - protein, 11 aa, Artificial Sequence
  P1 Heavy FW4
WGQGTLVTVSS

SEQ ID NO: 895 - protein, 11 aa, Artificial Sequence
  P2 Heavy FW4
WGQGTLVTVSA

SEQ ID NO: 896 - protein, 11 aa, Artificial Sequence
  P3 Heavy FW4
WGQGTLVTVSS

SEQ ID NO: 897 - protein, 11 aa, Artificial Sequence
  P4 Heavy FW4
WGQGTLVTVSS

SEQ ID NO: 898 - protein, 11 aa, Artificial Sequence
  P5 Heavy FW4
WGQGTLVTVSS

SEQ ID NO: 899 - protein, 11 aa, Artificial Sequence
  P6 Heavy FW4
WGQGTLVTVSS

SEQ ID NO: 900 - protein, 11 aa, Artificial Sequence
  Q1 Heavy FW4
WGQGSLVTVSS

SEQ ID NO: 901 - protein, 11 aa, Artificial Sequence
  Q2 Heavy FW4
WGQGSLVTVSS

SEQ ID NO: 902 - protein, 11 aa, Artificial Sequence
  R1 Heavy FW4
WGRGTRVTVSS

SEQ ID NO: 903 - protein, 11 aa, Artificial Sequence
  S1 Heavy FW4
WGQGTLVTVSS

SEQ ID NO: 904 - protein, 11 aa, Artificial Sequence
  T1 Heavy FW4
WGQGTTVAVSS

SEQ ID NO: 905 - protein, 11 aa, Artificial Sequence
  U1 Heavy FW4
WGQGTMLTVSS

SEQ ID NO: 906 - protein, 11 aa, Artificial Sequence
  V1 Heavy FW4
WGQGTLVTVSS

SEQ ID NO: 907 - protein, 21 aa, Artificial Sequence
  N1 Light FW1
ELTQSPGTLSLSPGERATLSC

SEQ ID NO: 908 - protein, 21 aa, Artificial Sequence
  N2 Light FW1
ELTQSPGTLSLFPGERATLSC

SEQ ID NO: 909 - protein, 21 aa, Artificial Sequence
  N3 Light FW1
ELTQSPGTLSLSPGERATLSC

SEQ ID NO: 910 - protein, 23 aa, Artificial Sequence
  N4 Light FW1
ELTLTQSPGTLSLSPGERATLSC

SEQ ID NO: 911 - protein, 21 aa, Artificial Sequence
  O1 Light FW1
ELTQSPSSLSASVGDRVTITC

SEQ ID NO: 912 - protein, 21 aa, Artificial Sequence
  P1 Light FW1
ELTQSPGTLSLSPGERATLSC

SEQ ID NO: 913 - protein, 21 aa, Artificial Sequence
  P1a Light FW1
ELTQSPGTLSLSPGERATLSC

SEQ ID NO: 914 - protein, 23 aa, Artificial Sequence
  P2 Light FW1
ELVLTQSPGTLSLSPGERATLSC

SEQ ID NO: 915 - protein, 21 aa, Artificial Sequence
  P3 Light FW1
ELTQSPGTLSLSPGERATLSC

SEQ ID NO: 916 - protein, 21 aa, Artificial Sequence
  P4 Light FW1
ELTQSPGTLSLSPGERATLSC

SEQ ID NO: 917 - protein, 21 aa, Artificial Sequence
  P5 Light FW1
ELTQSPASLSLSPGERATLSC

SEQ ID NO: 918 - protein, 21 aa, Artificial Sequence
  P6 Light FW1
ELIQSPGTLFLSSGERATLSC

SEQ ID NO: 919 - protein, 21 aa, Artificial Sequence
  Q1 Light FW1
ELTQSPGTLSLSPGERATLSC

SEQ ID NO: 920 - protein, 21 aa, Artificial Sequence
  Q2 Light FW1
ELTQSPASLSLSPGGSATLAC

SEQ ID NO: 921 - protein, 21 aa, Artificial Sequence
  R1 Light FW1
ELTQSPLSLPVTPGEPASISC

SEQ ID NO: 922 - protein, 23 aa, Artificial Sequence
  S1 Light FW1
ELVLTQSPGTLSLSPGERATLSC

SEQ ID NO: 923 - protein, 21 aa, Artificial Sequence
  T1 Light FW1
ELTQSPGTLSLSPGERATLSC

SEQ ID NO: 924 - protein, 21 aa, Artificial Sequence
  U1 Light FW1
ELTQSPSSLSASVGDRVTITC

SEQ ID NO: 925 - protein, 21 aa, Artificial Sequence
  V1 Light FW1
ELTQSPSSLSASVGDRVTITC

SEQ ID NO: 926 - protein, 15 aa, Artificial Sequence
  N1 Light FW2
WYQQKPGQAPRLLIY

SEQ ID NO: 927 - protein, 15 aa, Artificial Sequence
  N2 Light FW2
WYQQKGGRAPRLLIF

SEQ ID NO: 928 - protein, 15 aa, Artificial Sequence
  N3 Light FW2
WYQQKPGQAPRLLIY

SEQ ID NO: 929 - protein, 15 aa, Artificial Sequence
  N4 Light FW2
WYQQKPGQAPRLLIY

SEQ ID NO: 930 - protein, 15 aa, Artificial Sequence
  O1 Light FW2
WYQQKPGKPPRLLIY

SEQ ID NO: 931 - protein, 15 aa, Artificial Sequence
  P1 Light FW2
WFQQKPGQAPRLLIY

SEQ ID NO: 932 - protein, 15 aa, Artificial Sequence
  P1a Light FW2
WYQQKPGQPPRLLIY

SEQ ID NO: 933 - protein, 15 aa, Artificial Sequence
  P2 Light FW2
WYQQKPGQAPRLLIY

SEQ ID NO: 934 - protein, 15 aa, Artificial Sequence
  P3 Light FW2
WYQQKPGQAPRLLIY

SEQ ID NO: 935 - protein, 15 aa, Artificial Sequence
  P4 Light FW2
WFQHKSGRAPRLLIY

SEQ ID NO: 936 - protein, 15 aa, Artificial Sequence
  P5 Light FW2
WYQQKPGQAPRLLIY

SEQ ID NO: 937 - protein, 15 aa, Artificial Sequence
  P6 Light FW2
WFQHKSGRAPRLLIY

SEQ ID NO: 938 - protein, 15 aa, Artificial Sequence
  Q1 Light FW2
WYQQKPGQAPRLLIY

SEQ ID NO: 939 - protein, 15 aa, Artificial Sequence
  Q2 Light FW2
WYHQKPGQAPRLLIY

SEQ ID NO: 940 - protein, 15 aa, Artificial Sequence
  R1 Light FW2
WYLQRPGQSPQLLIY

SEQ ID NO: 941 - protein, 15 aa, Artificial Sequence
  S1 Light FW2
WYQQKPGQAPRLLIY

SEQ ID NO: 942 - protein, 15 aa, Artificial Sequence
  T1 Light FW2
WYQQKPGQAPRLLIY

SEQ ID NO: 943 - protein, 15 aa, Artificial Sequence
  U1 Light FW2
WYQQKPGKAPKLLIY

SEQ ID NO: 944 - protein, 15 aa, Artificial Sequence
  V1 Light FW2
WYQRRPGKAPNLLIY

SEQ ID NO: 945 - protein, 32 aa, Artificial Sequence
  N1 Light FW3
GIPDRFSGSGSGADFTLTISRLEPEDFAVYYC

SEQ ID NO: 946 - protein, 32 aa, Artificial Sequence
  N2 Light FW3
GIPDRFSGSGSGTDFTLTIGRLEPEDFAVYYC

SEQ ID NO: 947 - protein, 32 aa, Artificial Sequence; identical to SEQ ID NO: 504
  N3 Light FW3

SEQ ID NO: 948 - protein, 32 aa, Artificial Sequence
  N4 Light FW3
GIPDRFSGSGSGTGFTLIISRLEPEDFAVYYC

SEQ ID NO: 949 - protein, 32 aa, Artificial Sequence
  O1 Light FW3
GVPSRFSGGGSGTHFTLTITNLQPEDFATYYC

SEQ ID NO: 950 - protein, 32 aa, Artificial Sequence; identical to SEQ ID NO: 504
  P1 Light FW3

SEQ ID NO: 951 - protein, 32 aa, Artificial Sequence; identical to SEQ ID NO: 504
  P1a Light FW3

SEQ ID NO: 952 - protein, 32 aa, Artificial Sequence; identical to SEQ ID NO: 504
  P2 Light FW3

SEQ ID NO: 953 - protein, 32 aa, Artificial Sequence; identical to SEQ ID NO: 504
  P3 Light FW3

SEQ ID NO: 954 - protein, 32 aa, Artificial Sequence
  P4 Light FW3
DIPDRFSGSGSGTDFTLSISRLEPEDFAVYYC

SEQ ID NO: 955 - protein, 32 aa, Artificial Sequence
  P5 Light FW3
GIPDRFSGSGSGTDFTLTVSRLEPEDFAVYYC

SEQ ID NO: 956 - protein, 32 aa, Artificial Sequence
  P6 Light FW3
DIPDRFSGSGSGTDFTISISRLEPEDFAVYYC

SEQ ID NO: 957 - protein, 32 aa, Artificial Sequence; identical to SEQ ID NO: 504
  Q1 Light FW3

SEQ ID NO: 958 - protein, 32 aa, Artificial Sequence
  Q2 Light FW3
GIPGRFSGSGFGTEFTLTINNLQSDDFGVYYC

SEQ ID NO: 959 - protein, 32 aa, Artificial Sequence
  R1 Light FW3
GVPDRFSGSGSGTSFTLKISRVEAEDVGVYYC

SEQ ID NO: 960 - protein, 32 aa, Artificial Sequence; identical to SEQ ID NO: 504
  S1 Light FW3

SEQ ID NO: 961 - protein, 32 aa, Artificial Sequence; identical to SEQ ID NO: 504
  T1 Light FW3

SEQ ID NO: 962 - protein, 32 aa, Artificial Sequence
  U1 Light FW3
GVPPRFSGSGSGTDFTLTISSLQPEDFATYYC

SEQ ID NO: 963 - protein, 32 aa, Artificial Sequence
  V1 Light FW3
GVPSRFSGSGFGTHFTLTINSLQPEDIGTYYC

SEQ ID NO: 964 - protein, 12 aa, Artificial Sequence
  N1 Light FW4
FGQGTRLEIKRT

SEQ ID NO: 965 - protein, 12 aa, Artificial Sequence
  N2 Light FW4
FGQGTRLDIKRT

SEQ ID NO: 966 - protein, 12 aa, Artificial Sequence
  N3 Light FW4
FGGGTKVEIKRT

SEQ ID NO: 967 - protein, 12 aa, Artificial Sequence
  N4 Light FW4
FGQGTRLEIKRT

SEQ ID NO: 968 - protein, 12 aa, Artificial Sequence
  O1 Light FW4
FGQGTKVEIKRT

SEQ ID NO: 969 - protein, 12 aa, Artificial Sequence
  P1 Light FW4
FGQGTRLEIKRT

SEQ ID NO: 970 - protein, 12 aa, Artificial Sequence
  P1a Light FW4
FGQGTRLDIKRT

SEQ ID NO: 971 - protein, 12 aa, Artificial Sequence
  P2 Light FW4
FGPGTKVDIKRT

SEQ ID NO: 972 - protein, 12 aa, Artificial Sequence
  P3 Light FW4
FGGGTKVEIKRT

SEQ ID NO: 973 - protein, 12 aa, Artificial Sequence
  P4 Light FW4
FGQGTRLEIKRT

SEQ ID NO: 974 - protein, 12 aa, Artificial Sequence
  P5 Light FW4
FGQGTKVEIKRT

SEQ ID NO: 975 - protein, 12 aa, Artificial Sequence
  P6 Light FW4
FGQGTRLEIKRT

SEQ ID NO: 976 - protein, 12 aa, Artificial Sequence
  Q1 Light FW4
FGQGTKVEIKRT

SEQ ID NO: 977 - protein, 12 aa, Artificial Sequence
  Q2 Light FW4
FGQGTRLDIKRL

SEQ ID NO: 978 - protein, 12 aa, Artificial Sequence
  R1 Light FW4
FGQGTKVEMKRT

SEQ ID NO: 979 - protein, 12 aa, Artificial Sequence
  S1 Light FW4
FGQGTKVEIKRT

SEQ ID NO: 980 - protein, 12 aa, Artificial Sequence
  T1 Light FW4
FGQGTKVEIKRT

SEQ ID NO: 981 - protein, 12 aa, Artificial Sequence
  U1 Light FW4
FGQGTKLEIKRT

SEQ ID NO: 982 - protein, 12 aa, Artificial Sequence
  V1 Light FW4
FGPGTKVDLKRT

SEQ ID NO: 983 - protein, 3 aa, Artificial Sequence
  N3 CDRH1
WIG

SEQ ID NO: 984 - protein, 14 aa, Artificial Sequence
  V5 Tag
GKPIPNPLLGLDST

SEQ ID NO: 985 - DNA, 1734 bp, Artificial Sequence
  H77.20.E1E2
atgggttgctctttctctatcttccttctggccctgctctcttgcctgactgtgcccgcttcagcctaccaagtgcgcaattcctcggggctttaccatgtcaccaatgattgccctaactcgagtattgtgtacgaggcggccgatgccatcctgcacactccggggtgtgtcccttgcgttcgcgagggtaacgcctcgaggtgttgggtggcggtgacccccacggtggccaccagggacggcaaactccccacaacgcagcttcgacgtcatatcgatctgcttgtcgggagcgccaccctctgctcggccctctacgtgggggacctgtgcgggtctgtctttcttgttggtcaactgtttaccttctctcccaggcgccactggacgacgcaagactgcaattgttctatctatcccggccatataacgggtcatcgcatggcatgggatatgatgatgaactggtcccctacggcagcgttggtggtagctcagctgctccggatcccacaagccatcatggacatgatcgctggtgctcactggggagtcctggcgggcatagcgtatttctccatggtggggaactgggcgaaggtcctggtagtgctgctgctatttgccggcgtcgacgcggaaacccacgtcaccgggggaaatgccggccgcaccacggctgggcttgttggtctccttacaccaggcgccaagcagaacatccaactgatcaacaccaacggcagttggcacatcaatagcacggccttgaattgcaatgagagccttaacaccggctggttagcagggctcttctatcaacacaaattcaactcttcaggctgtcctgagaggttggccagctgccgacgccttaccgattttgcccagggctggggtcctatcagttatgccaacggaagcggcctcgacgaacgcccctactgctggcactaccctccaagaccttgtggcattgtgcccgcaaagagcgtgtgtggcccggtatattgcttcactcccagccccgtggtggtgggaacgaccgacaggtcgggcgcgcctacctacagctggggtgcaaatgatacggatgtcttcgtccttaacaacaccaggccaccgctgggcaattggttcggttgtacctggatgaactcaactggattcaccaaagtgtgcggagcgcccccttgtgtcatcggaggggtgggcaacaacaccttgctctgccccactgattgcttccgcaaacatccggaagccacatactctcggtgcggctccggtccctggattacacccaggtgcatggtcgactacccgtataggctttggcactatccttgtaccatcaattacaccatattcaaagtcaggatgtacgtgggaggggtcgagcacaggctggaagcggcctgcaactggacgcggggcgaacgctgtgatctggaagacagggacaggtccgagctcagcccgttgctgctgtccaccacacagtggcaggtccttccgtgttctttcacgaccctgccagccttgtccaccggcctcatccacctccaccagaacattgtggacgtgcagtacttgtacggggtagggtcaagcatcgcgtcctgggccattaagtgggagtacgtcgttctcctgttccttctgcttgcagacgcgcgcgtctgctcctgcttgtggatgatgttactcatatcccaggctgaggcctaa

SEQ ID NO: 986 - protein, 144 aa, Artificial Sequence
  N1 Heavy Chain
EVQLLEQSGPEVKKPGDSLRISCKMSGDSLVTTWIGWVRQKPGQGLEWMGIINPGDSSTNIYPGDSATRYGPSFQGQVTISIDKSTSTAYLQWNAVKPSDTGIYYCARHVPVPISGTFLWREREMHDFGYFDDWGQGTLVIVSS

SEQ ID NO: 987 - protein, 144 aa, Artificial Sequence
  N2 Heavy Chain
EVQLLEQSGPEVKKPGDSLRISCKMSGDSLVTTWIGWVRQKPGQGLEWMGIINPGDSSTNIYPGDSATRYGPSFQGQVTISIDKSTSTAYLQWNTVKPSDTGIYYCARHVPVPISGTFLWREREMHDFGYFDDWGQGTLVIVSS

SEQ ID NO: 988 - protein, 142 aa, Artificial Sequence
  N3 Heavy Chain
EVQLLEQSGAEVKKPGDSLRISCKMSGDSLVWIGWVRQKPGQGLEWMGIINPGDSATNIYPGDSDTRYGPSFQGQVTISIDKSTSTAYLQWNAVKASDTGIYYCARHVPVPISGTFLWREREMHDLGYFDDWGQGTLVIVSS

SEQ ID NO: 989 - protein, 144 aa, Artificial Sequence
  N4 Heavy Chain
EVQLLEQSGPEVKKPGDSLRISCKMSGDSLVTTWIGWVRQKPGQGLEWMGIINPGDSSTNIYPGDSATRYGPSFQGQVTISIDKSTSTAYLQWNNVKASDTGIYYCARHVPVPISGTFLWREREMHDFGYFDDWGQGTLVIVSS

SEQ ID NO: 990 - protein, 128 aa, Artificial Sequence
  O1 Heavy Chain
EVQLLEQSGAEVKKAGESVRLSCKASGYRFGDYWIAWVRQLPGRAPEWMGIIYPDDSDTKYSPSFQGQVTISADKSIRTTFLDWGSLKASDTAIYYCARGCLGAKCYYPHYYYGLDVWGQGTTVIVSS

SEQ ID NO: 991 - protein, 131 aa, Artificial Sequence
  P1 Heavy Chain
EVQLLESGGGVVQPGGSLRLSCAASGFTFTSFTMHWVRQAPGKGLEWVALISHDGSNKDYADSVRGRFTVSRDNSKKMVYLQMSSLRPDDAAVYYCARGGPAYYTYSDTLTGYHNVVGDYWGQGTLVTVSS

SEQ ID NO: 992 - protein, 131 aa, Artificial Sequence; identical to SEQ ID NO: 991
  P1a Heavy Chain

SEQ ID NO: 993 - protein, 131 aa, Artificial Sequence
  P2 Heavy Chain
EVQLLESGGGVVQPGKSLRLSCAVSGFTLNTFAMHWVRQVPGKGLEWVALTSHDGSRQDYADSVRGRFTISRDNSKSMVFLLMNSLRAEDTAVYYCVRGGPAYYTYNDVLTGYAYVVGDFWGQGTLVTVSS

SEQ ID NO: 994 - protein, 131 aa, Artificial Sequence
  P3 Heavy Chain
EVQLLESGGGVVQPGKSLTVSCAASGFTFSTFTMHWVRQAPGKWLEWVAVISHDGGTEHYADSVTGRFTISRDNSKNTLHLQMNSLRPEDTAVYFCARGGPAYYLYNDVLTGYYNVVGDFWGQGTLVTVSS

SEQ ID NO: 995 - protein, 131 aa, Artificial Sequence
  P4 Heavy Chain
EVQLLESGGGVVQPGKSLTVSCAASGFTFSTFTMHWVRQAPGKGLEWVAVISHDGGTEHYADSVTGRFTISRDNSKNTLHLQMNSLRPEDTAVYFCARGGPAYYLYNDVLTGYYNVVGDFWGQGTLVTVSS

SEQ ID NO: 996 - protein, 131 aa, Artificial Sequence
  P5 Heavy Chain
EVQLLESGGGVVQPGKSLTVSCAASGFTFSTFTMHWVRQAPGKWLEWVAVISHDGGTEHYADSVTGRFTISRDNSKNTLHMQMNSLRLEDTAVYFCARGGPAYYLYNDVLTGYYNVVGDFWGQGTLVTVSS

SEQ ID NO: 997 - protein, 133 aa, Artificial Sequence
  P6 Heavy Chain
EVQLLEQSGAEVRKPGASVKVSCKASGYTFTNNGLNWVRQAPGQGLEWMGWISPYNGDTDFAHKFQGRISMTTDTSTNTAYMELRSLRSDDTAVYYCARDRNSAGGTWLFRDPPPGSTFFDSWGQGSLVTVSS

SEQ ID NO: 998 - protein, 133 aa, Artificial Sequence
  Q1 Heavy Chain
EVQLLEQSGAEVKKPGASVKVSCKASGYTFTNNGLNWVRQAPGQGLEWMGWISPYNGDTDFAHKFQGRISMTTDTSTNTAYMELRSLRSDDTAVYYCARDRNSAGGTWLFRDPPPGSTFFDSWGQGSLVTVSS

SEQ ID NO: 999 - protein, 126 aa, Artificial Sequence
  Q2 Heavy Chain
EVQLLEQSGAEVKKPGASVKVSCKASGYTFSIYGVAWVRQAPGQGLEWMGWISPQNGDTHSPQKFQGRLTMTTDTSTSTAYMELRSLRSDDTAVYFCARDYGVNFGGGSEHNLDYWGRGTRVTVSS

SEQ ID NO: 1000 - protein, 132 aa, Artificial Sequence
  R1 Heavy Chain
EVQLLEQSGAEVKKPGTSVKVSCTASGYIFTSFGISWVRQAPGQGLEWMGRIDTYNGKTNYAQKLQGRVTMTTDTYTSTAYMELRSLTSDDTAVYYCARDDCRSSTCYLAQHNWQAYYHDSWGQGTLVTVSS

SEQ ID NO: 1001 - protein, 123 aa, Artificial Sequence
  S1 Heavy Chain
EVQLLESGGGLVQPGGSLRLSCAASGFTFSRFWMHWVRQAPGKGLVWVARINSDGSSTTYADSVKGRFTISRDNAKNTLYLQMNSLRDEDTAVYFCARGGDSSSPYYYPMDVWGQGTTVAVSS

SEQ ID NO: 1002 - protein, 125 aa, Artificial Sequence
  T1 Heavy Chain
EVQLLEQSGPEVKRPGTSVKMSCKISGGASITQAMSWVRQAPGQGLEWMGGITPIFGTVNYAQKILGRVTITADEDTVSLELSSLKSEDTAVYYCAREVNLKTWNLAHPNVFDVWGQGTMLTVSS

SEQ ID NO: 1003 - protein, 125 aa, Artificial Sequence
  U1 Heavy Chain
EVQLLEQSGAEVQKPGASVKVSCKPSGYIFTNFGISWVRQAPGQGLEWMAWINTYNGKTTYAQSLQGRVTLTTDPYTNTVFMELRSLRSDDTAVYYCARENEGEYVWGHFRSDYWGQGTLVTVSS

SEQ ID NO: 1004 - protein, 144 aa, Artificial Sequence; identical to SEQ ID NO: 986
  V1 Heavy Chain

SEQ ID NO: 1005 - protein, 108 aa, Artificial Sequence
  N1 Light Chain
ELTQSPGTLSLSPGERATLSCRASQSVSSSYLAWYQQKPGQAPRLLIYGASNRAAGIPDRFSGSGSGADFTLTISRLEPEDFAVYYCQQYGSSLITFGQGTRLEIKRT

SEQ ID NO: 1006 - protein, 107 aa, Artificial Sequence
  N2 Light Chain
ELTQSPGTLSLFPGERATLSCRASQSILGRYLAWYQQKGGRAPRLLIFGASKRATGIPDRFSGSGSGTDFTLTIGRLEPEDFAVYYCQHYGSSITFGQGTRLDIKRT

SEQ ID NO: 1007 - protein, 107 aa, Artificial Sequence
  N3 Light Chain
ELTQSPGTLSLSPGERATLSCRASQSVSSSYLAWYQQKPGQAPRLLIYGASSRATGIPDRFSGSGSGTDFTLTISRLEPEDFAVYYCQQYGSSLTFGGGTKVEIKRT

SEQ ID NO: 1008 - protein, 110 aa, Artificial Sequence
  N4 Light Chain
ELTLTQSPGTLSLSPGERATLSCRASQSVSNNYLAWYQQKPGQAPRLLIYGASSRATGIPDRFSGSGSGTGFTLIISRLEPEDFAVYYCQQYGSSSITFGQGTRLEIKRT

SEQ ID NO: 1009 - protein, 108 aa, Artificial Sequence
  O1 Light Chain
ELTQSPSSLSASVGDRVTITCRATQGIDNYLNWYQQKPGKPPRLLIYGASSLQSGVPSRFSGGGSGTHFTLTITNLQPEDFATYYCQQSYSTPPETFGQGTKVEIKRT

SEQ ID NO: 1010 - protein, 107 aa, Artificial Sequence
  P1 Light Chain
ELTQSPGTLSLSPGERATLSCRASQVRGFLAWFQQKPGQAPRLLIYGASNRAPGIPDRFSGSGSGTDFTLTISRLEPEDFAVYYCQQYGDSPPITFGQGTRLEIKRT

SEQ ID NO: 1011 - protein, 109 aa, Artificial Sequence
  P1a Light Chain
ELTQSPGTLSLSPGERATLSCRTSQSVSSTYLAWYQQKPGQPPRLLIYGASNRAPGIPDRFSGSGSGTDFTLTISRLEPEDFAVYYCQQYGDSPPITFGQGTRLDIKRT

SEQ ID NO: 1012 - protein, 110 aa, Artificial Sequence
  P2 Light Chain
ELVLTQSPGTLSLSPGERATLSCRASQSVSSSYLAWYQQKPGQAPRLLIYGASSRATGIPDRFSGSGSGTDFTLTISRLEPEDFAVYYCQQYGDSPPFFGPGTKVDIKRT

SEQ ID NO: 1013 - protein, 108 aa, Artificial Sequence
  P3 Light Chain
ELTQSPGTLSLSPGERATLSCRASQSVSSTYLAWYQQKPGQAPRLLIYGASSRATGIPDRFSGSGSGTDFTLTISRLEPEDFAVYYCQQYGSSPLTFGGGTKVEIKRT

SEQ ID NO: 1014 - protein, 109 aa, Artificial Sequence
  P4 Light Chain
ELTQSPGTLSLSPGERATLSCRASQSVSSSNLAWFQHKSGRAPRLLIYGASNRAPDIPDRFSGSGSGTDFTLSISRLEPEDFAVYYCQRYGDSPPITFGQGTRLEIKRT

SEQ ID NO: 1015 - protein, 106 aa, Artificial Sequence
  P5 Light Chain
ELTQSPASLSLSPGERATLSCRASQSVGTYFAWYQQKPGQAPRLLIYGASNRATGIPDRFSGSGSGTDFTLTVSRLEPEDFAVYYCQQYGSSPTFGQGTKVEIKRT

SEQ ID NO: 1016 - protein, 109 aa, Artificial Sequence
  P6 Light Chain
ELIQSPGTLFLSSGERATLSCRASQSVSSSNLAWFQHKSGRAPRLLIYGASNRAPDIPDRFSGSGSGTDFTISISRLEPEDFAVYYCQRYGDSPPITFGQGTRLEIKRT

SEQ ID NO: 1017 - protein, 108 aa, Artificial Sequence
  Q1 Light Chain
ELTQSPGTLSLSPGERATLSCRASQSVSSSYLAWYQQKPGQAPRLLIYGASSRATGIPDRFSGSGSGTDFTLTISRLEPEDFAVYYCQQYGSSPQTFGQGTKVEIKRT

SEQ ID NO: 1018 - protein, 108 aa, Artificial Sequence
  Q2 Light Chain
ELTQSPASLSLSPGGSATLACRASRGVNSNLAWYHQKPGQAPRLLIYSASTRATGIPGRFSGSGFGTEFTLTINNLQSDDFGVYYCQQYDDTPQITFGQGTRLDIKRL

SEQ ID NO: 1019 - protein, 112 aa, Artificial Sequence
  R1 Light Chain
ELTQSPLSLPVTPGEPASISCRSSYSLLHINGYKYLDWYLQRPGQSPQLLIYLGSNRAPGVPDRFSGSGSGTSFTLKISRVEAEDVGVYYCMQSLQAPWTFGQGTKVEMKRT

SEQ ID NO: 1020 - protein, 110 aa, Artificial Sequence
  S1 Light Chain
ELVLTQSPGTLSLSPGERATLSCRASQSVSSSYLAWYQQKPGQAPRLLIYGASSRATGIPDRFSGSGSGTDFTLTISRLEPEDFAVYYCQQYGSSPQTFGQGTKVEIKRT

SEQ ID NO: 1021 - protein, 108 aa, Artificial Sequence; identical to SEQ ID NO: 1017
  T1 Light Chain

SEQ ID NO: 1022 - protein, 107 aa, Artificial Sequence
  U1 Light Chain
ELTQSPSSLSASVGDRVTITCRASQSISSFLNWYQQKPGKAPKLLIYAASSLQSGVPPRFSGSGSGTDFTLTISSLQPEDFATYYCQQSYSTPRTFGQGTKLEIKRT

SEQ ID NO: 1023 - protein, 108 aa, Artificial Sequence
  V1 Light Chain
ELTQSPSSLSASVGDRVTITCQASQDISNFLNWYQRRPGKAPNLLIYDATHLETGVPSRFSGSGFGTHFTLTINSLQPEDIGTYYCQHFDDVPSFTFGPGTKVDLKRT

SEQ ID NO: 1024 - DNA, 432 bp, Artificial Sequence
  N1 Heavy Chain
gaggtgcagctgctcgagcagtctgggccagaggtgaaaaagcccggggattctctgaggatctcctgtaagatgtctggagacagtttagtcaccacttggatcggctgggtgcgccagaagcccgggcaaggcctggagtggatggggatcatcaatcctggtgactcttctaccaacatctatcctggtgactctgccacgcgatatggcccgtccttccaaggccaggtcaccatctcaatcgacaagtcaaccagcaccgcctacctgcagtggaacgctgtgaagccctcggacaccggcatttattactgtgcgagacatgtccccgtaccaatctccgggacttttctttggagagagcgggaaatgcatgatttcggctactttgacgactggggccagggaaccctggtcatcgtctcctca

SEQ ID NO: 1025 - DNA, 432 bp, Artificial Sequence
  N2 Heavy Chain
gaggtgcagctgctcgagcagtctgggccagaggtgaaaaagcccggggattctctgaggatctcctgtaagatgtctggagacagtttagtcaccacttggatcggctgggtgcgccagaagcccgggcaaggcctggagtggatggggatcatcaatcctggtgactcttctaccaacatctatcctggtgactctgccacgcgatatggcccgtccttccaaggccaggtcaccatctcaatcgacaagtcaaccagcaccgcctacctgcagtggaacactgtgaagccctcggacaccggcatttattactgtgcgagacatgtccccgtaccaatctccgggacttttctttggagagagcgggaaatgcatgatttcggctactttgacgactggggccagggaaccctggtcatcgtctcctca

SEQ ID NO: 1026 - DNA, 426 bp, Artificial Sequence
  N3 Heavy Chain
gaggtgcagctgctcgagcagtctggggcagaggtgaagaagcccggggattctctgaggatctcctgtaagatgtctggagacagtttagtctggatcggctgggtgcgccagaagcccgggcaaggcctggagtggatggggatcatcaatcctggtgactctgctaccaacatctatcctggcgactctgacacccgatatggcccgtccttccaaggccaggtcaccatctcaatcgacaagtccaccagcaccgcctacctgcagtggaacgctgtgaaggcctcggacaccggcatttattactgtgcgagacatgtccccgtaccaatctccgggacttttctttggagagagagggaaatgcatgatttgggctactttgacgactggggccagggaaccctggtcatcgtctcctca

SEQ ID NO: 1027 - DNA, 432 bp, Artificial Sequence
  N4 Heavy Chain
gaggtgcagctgctcgagcagtctgggccagaggtgaaaaagcccggggattctctgaggatctcctgtaagatgtctggagacagtttagtcaccacttggatcggctgggtgcgccagaagcccgggcaaggcctggagtggatggggatcatcaatcctggtgactcttctaccaacatctatcctggtgactctgccacgcgatatggcccgtccttccaaggccaggtcaccatctcaatcgacaagtccaccagcaccgcgtacctgcagtggaacaatgtgaaggcctcggacaccggcatttattactgtgcgagacatgtccccgtaccaatctccgggacttttctttggagagagcgggaaatgcatgatttcggctactttgacgactggggccagggaaccctggtcatcgtctcctca

SEQ ID NO: 1028 - DNA, 384 bp, Artificial Sequence
  O1 Heavy Chain
gaggtgcagctgctcgagcagtctggggcggaggtgaaaaaggccggggagtctgtcagactctcctgtaaggcttcgggatacaggtttggcgactactggatcgcctgggtgcgccagttgcccggaagagccccggaatggatggggatcatctatcctgatgactctgataccaagtacagcccgtccttccaaggccaggtcaccatctcagccgacaagtccatcagaaccaccttcttggactggggcagcctgaaggcctcggacaccgccatctattactgtgcgagaggctgccttggtgccaagtgctactatcctcactactattacggtttggacgtctggggccaagggaccacggtcatcgtctcctca

SEQ ID NO: 1029 - DNA, 393 bp, Artificial Sequence
  P1 Heavy Chain
gaggtgcagctgctcgagtcggggggaggcgtggtccagcctggggggtccctgagactctcctgtgcagcctctggattcacattcactagctttactatgcactgggtccgccaggctccaggcaaggggctggagtgggtggcacttatatcacatgatggaagcaataaagactacgcggactccgtgaggggccgattcaccgtctccagagacaattccaagaaaatggtttatttgcagatgagcagcctgagacctgacgacgcggctgtctattactgtgcgagaggggggcccgcctattatacttattccgatactttgactggttatcataacgtcgtgggggactactggggccagggaaccctggtcaccgtctcctca

SEQ ID NO: 1030 - DNA, 393 bp, Artificial Sequence; identical to SEQ ID NO: 1029
  P1a Heavy Chain

SEQ ID NO: 1031 - DNA, 393 bp, Artificial Sequence
  P2 Heavy Chain
gaggtgcagctgctcgagtcagggggaggcgtggtccagcctgggaggtccctgagactctcctgtgcagcctctggattcactcttgatacgtttactatgcactgggtccgccagtctccaggcaaggggctggagtgggtggcccttatctcacatgatgccaacaataaagactacgcggactccgtgaagggccgattcaccatctccagagacaattccaagaaattggtgtatttgcagatggacagcctgagatctgaggacacggctgtctattactgtgcgagaggggggcccgcctattatctgtattccgatgttttgactggttttcataacgtcgtgggggactattggggccagggaaccctggtcaccgtctccgca

SEQ ID NO: 1032 - DNA, 393 bp, Artificial Sequence
  P3 Heavy Chain
gaggtgcagctgctcgagtctgggggaggcgtggtccagcctgggaagtccctgagactctcctgtgcagtctctggattcacgttgaatacctttgctatgcactgggtccgccaggtcccaggcaaggggctggagtgggtggctctgacctcacatgatggaagccgacaagactacgcagactccgtgaggggccgattcaccatctccagagacaactccaagagtatggtgtttctgctgatgaacagcctgagagccgaggacacggctgtgtattattgtgtgagaggggggcccgcatattatacgtacaacgatgttttgactggttacgcttatgtcgtgggggacttctggggccagggaaccctggtaaccgtctcctca

SEQ ID NO: 1033 - DNA, 393 bp, Artificial Sequence
  P4 Heavy Chain
gaggtgcagctgctcgagtctgggggaggcgtggtccagcctgggaagtccctgacagtctcctgtgcagcctctggattcaccttcagtacctttaccatgcactgggtccgccaggctccaggcaagtggctggagtgggtggcagtcatctcacatgatggcggcactgaacactacgcagactccgtgacgggccgattcaccatctcccgagacaattccaagaacacgctgcatctgcaaatgaacagcctgagacctgaggacacggcagtgtacttttgtgcgagaggggggcccgcgtattatttgtataacgatgttctgactggttattataacgtcgtgggggacttttggggccagggaaccctggtcaccgtctcctca

SEQ ID NO: 1034 - DNA, 393 bp, Artificial Sequence
  P5 Heavy Chain
gaggtgcagctgctcgagtctgggggaggcgtggtccagcctgggaagtccctgacagtctcctgtgcagcctctggattcaccttcagtacctttaccatgcactgggtccgccaggctccaggcaaggggctggagtgggtggcagtcatctcacatgatggcggcactgaacactacgcagactccgtgacgggccgattcaccatctcccgagacaattccaagaacacgctgcatctgcaaatgaacagcctgagacctgaggacacggcagtgtacttttgtgcgagaggggggcccgcgtattatttgtataacgatgtcctgactggttattataacgtcgtgggggacttctggggccagggaaccctggtcaccgtctcctcg

SEQ ID NO: 1035 - DNA, 393 bp, Artificial Sequence
  P6 Heavy Chain
gaggtgcagctgctcgagtctgggggaggcgtggtccagcctgggaagtccctgacagtctcctgtgcagcctctggattcaccttcagtacctttaccatgcactgggtccgccaggctccaggcaagtggttggagtgggtggcagtcatctcacatgatggcggcactgaacactacgcagactccgtgacgggccgattcaccatctcccgagacaattccaagaacacgctgcatatgcaaatgaacagcctgagacttgaggacacggcagtgtacttttgtgcgagaggggggcccgcgtattatttgtataacgatgttctgactggttattataacgtcgtgggggacttttggggccagggaaccctggtcaccgtctcctca

SEQ ID NO: 1036 - DNA, 399 bp, Artificial Sequence
  Q1 Heavy Chain
gaggtgcagctgctcgagcagtctggggctgaggtgaggaagcctggggcctccgtgaaggtctcctgcaaggcttctggttacacctttaccaacaatggtctcaactgggtgcgacaggcccctggacaagggcttgagtggatggggtggatcagcccttacaatggagacacagactttgcacataagttccagggccgaatcagcatgaccacagacacatccacgaatacagcctacatggagttgaggagtctgagatcggacgacacggccgtgtattactgtgcgagagatcggaattcagcaggtggtacctggctttttcgcgaccctccacctggctcgacgttttttgattcctggggccagggatccctggtcaccgtctcctca

SEQ ID NO: 1037 - DNA, 399 bp, Artificial Sequence
  Q2 Heavy Chain
gaggtgcagctgctcgagcagtcaggagctgaggtgaagaagcctggggcctccgtgaaggtctcctgcaaggcttctggttacacctttaccaacaatggtctcaactgggtgcgacaggcccctggacaagggcttgagtggatggggtggatcagcccttacaatggggacacagactttgcacataagttccagggccgaatcagcatgaccacagacacatccacgaatacagcctacatggagttgaggagtctgagatcagacgacacggccgtgtattactgtgcgagagatcggaattcagcaggtggtacctggctttttcgcgaccctccacctggctcgacgttttttgattcctggggccagggatccctggtcaccgtctcctca

SEQ ID NO: 1038 - DNA, 378 bp, Artificial Sequence
  R1 Heavy Chain
gaggtgcagctgctcgagcagtctggggctgaggtgaagaagcctggggcctcagtgaaggtctcctgcaaggcttctggttacacctttagcatctatggtgttgcctgggtgcgacaggcccctggacagggacttgagtggatgggatggatcagcccccagaatggtgacacacactctccacagaagttccagggcagactcacaatgaccacagacacctccacgagcacagcctacatggagctgaggagcctgagatctgacgacacggccgtatatttttgtgcgagagactatggagtgaacttcgggggagggtccgaacacaacctagactactggggccggggaacccgggtcaccgtctcctca

SEQ ID NO: 1039 - DNA, 396 bp, Artificial Sequence
  S1 Heavy Chain
gaggtgcagctgctcgagcagtctggggctgaggttaagaagcctgggacctcagtgaaggtctcctgcacggcttctggttacatctttaccagttttggtattagctgggtgcgacaggcccctggacaaggacttgagtggatgggacggatcgacacttacaatggtaagacgaactatgcacagaagctccagggcagagtcaccatgaccacagacacatacacgagcacagcctacatggaactgaggagcctgacatctgacgacacggccgtgtattactgtgcgagagatgattgtaggagttccacttgctatctggctcaacacaactggcaggcatattaccatgactcctggggccagggaaccctggtcaccgtctcctca

SEQ ID NO: 1040 - DNA, 369 bp, Artificial Sequence
  T1 Heavy Chain
gaggtgcagctgctcgagtctgggggaggcttagttcagcctggggggtccctgagactctcctgtgcagcctctggattcaccttcagtaggttctggatgcactgggtccgccaagctccagggaaggggctggtgtgggtcgcacgtattaatagtgatgggagtagcacaacctacgcggactccgtgaagggccgattcaccatctccagagacaacgccaagaacacgttgtatctgcaaatgaacagtctgagagacgaggacacggctgtgtatttctgtgcaagagggggggacagctcatccccctactactaccctatggacgtctggggccaagggaccacggtcgccgtctcatca

SEQ ID NO: 1041 - DNA, 375 bp, Artificial Sequence
  U1 Heavy Chain
gaggtgcagctgctcgagcagtcagggcctgaggtgaagaggcctgggacctcggtgaaaatgtcctgcaagatttcgggaggcgcctccatcactcaagccatgagttgggtccgacaggccccaggacaaggtcttgagtggatggggggcatcacccctatctttggaacagtaaactacgcacagaagatcttgggcagagtcaccattaccgcggacgaggacacagtctccttagagctgagcagtctgaagtctgaggacacggccgtctattattgtgcgagagaggtcaatttgaaaacctggaacctcgcccatcccaatgtctttgatgtctggggccaagggacaatgctcactgtctcttca

SEQ ID NO: 1042 - DNA, 375 bp, Artificial Sequence
  V1 Heavy Chain
gaggtgcagctgctcgagcagtctggggctgaggtgcagaagcctggggcctcagtgaaagtctcctgcaagccgtctggttacatttttaccaattttggtatcagctgggttcgacaggcccctggacaagggcttgagtggatggcatggatcaacacttacaatggtaaaacaacctatgcacagagtctccagggcagagtcaccctgaccaccgacccatacacgaacacagtcttcatggaactgaggagcctgagatctgacgacacggccgtctattactgtgcgagagaaaacgagggtgaatatgtttggggtcattttcgttccgactactggggccagggaaccctggtcaccgtctcctca

SEQ ID NO: 1043 - DNA, 324 bp, Artificial Sequence
  N1 Light Chain
gagctcacacagtctccaggcaccctgtctttgtctccaggggaaagagccaccctctcctgcagggccagtcagagtgttagcagcagctacttagcctggtaccagcagaaacctggccaggctcccaggctcctcatctatggtgcatccaacagggccgctggcatcccagacaggttcagtggcagtgggtctggggcagacttcactctcaccatcagcagactggagcctgaagattttgcagtgtattactgtcagcagtatggtagctcacttatcaccttcggccaagggacacgactggagattaaacgaact

SEQ ID NO: 1044 - DNA, 321 bp, Artificial Sequence
  N2 Light Chain
gagctcacgcagtctccaggcaccctgtctttgtttccaggggaaagagccaccctctcctgcagggccagtcagagtattctcggcagatacttagcctggtatcagcagaaaggcggccgggctcccagactcctcatctttggtgcatccaagagggccactggcatcccagacaggttcagtggcagtgggtctgggacagacttcactctcaccatcggcagactggagcctgaagattttgcagtgtattactgtcagcactatggtagttcaatcaccttcggccaagggacacggctggacattaaacgaact

SEQ ID NO: 1045 - DNA, 321 bp, Artificial Sequence
  N3 Light Chain
gagctcacgcagtctccaggcaccctgtctttgtctccaggggaaagagccaccctctcctgcagggccagtcagagtgttagcagcagctacttagcctggtaccagcagaaacctggccaggctcccaggctcctcatctatggtgcatccagcagggccactggcatcccagacaggttcagtggcagtgggtctgggacagacttcactctcaccatcagcagactggagcctgaagattttgcagtgtattactgtcagcagtatggtagctccctcactttcggcggagggaccaaggtggagatcaaacgaact

SEQ ID NO: 1046 - DNA, 330 bp, Artificial Sequence
  N4 Light Chain
gagctcacactcacgcagtctccaggcaccctgtctttgtctccaggggaaagagccaccctctcctgcagggccagtcagagtgttagcaacaactacttagcctggtaccagcagaaacctggccaggctcccaggctcctcatctatggtgcatccagcagggccactggcatcccagacaggttcagtggcagtgggtctgggacaggcttcactctcatcatcagcagactggagcctgaagattttgcagtgtattactgtcagcagtatggtagctcttcgatcaccttcggccaagggacacgactggagattaaacgaact

SEQ ID NO: 1047 - DNA, 324 bp, Artificial Sequence
  O1 Light Chain
gagctcactcagtctccatcgtccctgtctgcatcggtaggagatagagtcaccatcacttgccgggcaactcagggcattgacaactatttaaattggtatcagcaaaaaccggggaaaccccctaggctcctcatctatggtgcatccagtttgcaaagtggggtcccatcaagatttagtggcggtggatctgggacacatttcactctcaccatcaccaatctgcaacctgaagattttgcaacttactactgtcaacagagttacagtacccctccggagacgttcggccaggggaccaaggtggaaatcaaacgaact

SEQ ID NO: 1048 - DNA, 321 bp, Artificial Sequence
  P1 Light Chain
gagctcacgcagtctccaggcaccctgtctttgtctccaggggaaagagccaccctctcctgcagggccagtcaggtgcgtggcttcttagcctggttccagcagaaacctggccaggctcccagactcctcatctatggtgcatccaacagggcccctggaatcccagacaggttcagtggcagtgggtctgggacagacttcactctcaccatcagcagactggagcctgaagattttgcagtgtattactgtcagcagtatggtgactcacctccgatcaccttcggccaagggacacgactggagattaaaagaact

SEQ ID NO: 1049 - DNA, 327 bp, Artificial Sequence
  P1a Light Chain
gagctcacacagtctccaggcaccctgtctttgtctccaggggaaagagccaccctctcctgcaggaccagtcagagtgttagcagcacttacttagcctggtaccagcagaaacctggccagcctcccaggctcctcatctatggtgcatccaatagggcccctggaatcccagacaggttcagtggcagtgggtctgggacagacttcactctcaccatcagcagactggagcctgaagattttgcagtgtattactgtcagcagtatggtgactcacctccgatcaccttcggccaagggacacgactggacattaaaagaact

SEQ ID NO: 1050 - DNA, 327 bp, Artificial Sequence
  P2 Light Chain
gagctcgtgttgacgcagtctccaggcaccctgtctttgtctccaggggaaagagccaccctctcctgcagggccagtcagagtgttagcagcagctacttagcctggtaccagcagaaacctggccaggctcccaggctcctcatctatggtgcatccagcagggccactggcatcccagacaggttcagtggcagtgggtctgggacagacttcactctcaccatcagcagactggagcctgaagattttgcagtgtattactgtcagcagtatggtagctcaccctttttcggccctgggaccaaagtggatatcaaacgaact

SEQ ID NO: 1051 - DNA, 324 bp, Artificial Sequence
  P3 Light Chain
gagctcacgcagtctccaggcaccctgtctttgtctccaggggaaagagccaccctctcctgcagggccagtcagagtgttagcagcacctacttagcctggtaccagcagaaacctggccaggctcccaggctcctcatctatggtgcatccagcagggccactggcatcccagacaggtttagtggcagtgggtctgggacagacttcactctcaccatcagcagactggagcctgaagattttgcagtgtattactgtcagcagtatggtagctcaccgctcactttcggcggagggaccaaggtggagatcaaacgaact

SEQ ID NO: 1052 - DNA, 327 bp, Artificial Sequence
  P4 Light Chain
gagctcactcagtctccaggcaccctgtctctgtctccaggggaaagagccaccctctcctgcagggccagtcagagtgttagcagcagcaacttagcctggttccagcataaatctggccgggctcccaggctcctcatctatggtgcatccaacagggcccctgacatcccagacaggttcagtggcagtgggtctgggacagacttcactctcagcatcagcagactggagcctgaagattttgcagtgtattactgtcagcggtatggtgactcacctccgatcaccttcggccaagggacacgactggagattaaacgaact

SEQ ID NO: 1053 - DNA, 318 bp, Artificial Sequence
  P5 Light Chain
gagctcacacagtctccagcctccctgtctttgtctccaggggaaagggccaccctctcctgcagggccagtcagagtgttggcacctactttgcctggtaccaacagaaacctggccaggctcccaggctcctcatctatggtgcgtccaacagggccactggcatcccagacaggttcagtggcagtgggtctgggacagacttcaccctcaccgtcagcagactggaacctgaagattttgcagtgtattactgtcagcagtatggtagctcaccgacgttcggccaagggaccaaggtggaaatcaaacgaact

SEQ ID NO: 1054 - DNA, 327 bp, Artificial Sequence
  P6 Light Chain
gagctcattcagtctccaggcaccctgtttttgtcttcaggggaaagagccaccctctcctgcagggccagtcagagtgttagcagcagcaacttagcctggttccagcataaatctggccgggctcccaggctcctcatctatggtgcatccaacagggcccctgacatcccagacaggttcagtggcagtgggtctgggacagacttcactatcagcatcagcagactggagcctgaagattttgcagtgtattactgtcagcggtatggtgactcacctccgatcaccttcggccaagggacacgactggagattaaacgaact

SEQ ID NO: 1055 - DNA, 324 bp, Artificial Sequence
  Q1 Light Chain
gagctcacgcagtctccaggcaccctgtctttgtctccaggggaaagagccaccctctcctgcagggccagtcagagtgttagcagcagctacttagcctggtaccagcagaaacctggccaggctcccaggctcctcatctatggtgcatccagcagggccactggcatcccagacaggttcagtggcagtgggtctgggacagacttcactctcaccatcagcagactggagcctgaagattttgcagtgtattactgtcaacagtatggtagctcacctcagacgttcggccaagggaccaaggtggaaatcaaacgaact

SEQ ID NO: 1056 - DNA, 339 bp, Artificial Sequence
  Q2 Light Chain
gagctcacgcagtctccagcctccctgtctctgtctccagggggaagcgccaccctcgcctgcagggccagccggggtgttaacagcaacctagcctggtatcaccagaggcctggccaggctcccaggctcctcatttatagtgcatctaccagggccactggtatcccaggcaggttcagcggcagtgggtttgggacagagttcactctcaccatcaacaatctgcagtctgacgactttggagtttattactgtcagcagtatgatgacacgcctcagatcaccttcggccagggaacacgactggacattaaacggctggacattaagcgaact

SEQ ID NO: 1057 - DNA, 336 bp, Artificial Sequence
  R1 Light Chain
gagctcactcagtctccactctccctgcccgtcacccctggagagccggcctccatctcctgcaggtctagttacagcctcctccatattaatggatacaagtatttggattggtacctgcagaggccagggcagtctccacagctcctgatctatttgggttctaatcgggcccccggggtccctgacaggttcagtggcagtggatcaggcacatcttttacactgaaaatcagcagagtggaggctgaggatgttggggtttattactgcatgcaaagtcttcaagctccgtggacgttcggccaagggaccaaggtggaaatgaaacgaact

SEQ ID NO: 1058 - DNA, 330 bp, Artificial Sequence
  S1 Light Chain
gagctcgtgttgacacagtctccaggcaccctgtctttgtctccaggggaaagagccaccctctcctgcagggccagtcagagtgttagcagcagctacttagcctggtaccagcagaaacctggccaggctcccaggctcctcatctatggtgcatccagcagggccactggcatcccagacaggttcagtggcagtgggtctgggacagacttcactctcaccatcagcagactggagcctgaagattttgcagtgtattactgtcagcagtatggtagctcacctcagacgttcggccaagggaccaaggtggaaatcaaacgaact

SEQ ID NO: 1059 - DNA, 324 bp, Artificial Sequence; identical to SEQ ID NO: 1055
  T1 Light Chain

SEQ ID NO: 1060 - DNA, 321 bp, Artificial Sequence
  U1 Light Chain
gagctcacccagtctccatcctccctgtctgcatctgtaggagacagagtcaccatcacttgccgggcaagtcagagcattagcagctttttaaattggtatcagcagaaaccagggaaagcccctaagctcctgatctatgctgcatccagtttgcaaagtggggtcccaccaaggttcagtggcagtggatctgggacagatttcactctcaccatcagcagtctgcaacctgaagattttgcaacttactactgtcaacagagttacagtacccctcgcacttttggccaggggaccaagctggagatcaaacgaact

SEQ ID NO: 1061 - DNA, 324 bp, Artificial Sequence
  V1 Light Chain
gagctcacccagtctccatcctccctgtctgcatctgtaggagacagagtcaccatcacttgccaggcaagtcaagacattagcaactttttaaattggtatcaacggagacctgggaaagcccctaatctcctgatctacgatgcaacccatttggaaacaggggtcccatcaaggttcagtggaagtggatttgggacacattttactctcaccatcaacagcctgcagcctgaagatattggtacatattactgtcaacactttgatgacgtcccctctttcactttcggccctgggaccaaagtggatctcaaacgaact

SEQ ID NO: 1062 - protein, 125 aa, Artificial Sequence
  B4 Heavy Chain
EVQLLEQSGAEVKKPGSSVKVSCRASGSPFSSYTITWVRQAPGQGLEWMGGIILMTGKANYAQKFQGRVTITADRSTTTAYMEMSSPTSDDTAIYYCARDPYVYAGDDVWSLSRWGQGTLVIVSP

SEQ ID NO: 1063 - protein, 126 aa, Artificial Sequence
  B5 Heavy Chain
EVQLLESGAEVKKPGSSVKVSCRASGSPYSSYTITWVRQAPGQGLEWMGGIILMTGKANYAQKFQGRVTITADRATATAYMEMSSLTSDDTAIYYCARDPYVYAGDDVWSLSRWGQGTPVIVSSAS

SEQ ID NO: 1064 - protein, 127 aa, Artificial Sequence
  B6 Heavy Chain
EVQLLEQSGAEVKKPGSSVKVSCRASGSPYSSYTITWVRQAPGQGLEWMGGIILMTGKANYAQKFQGRVTITADRATATAYMEMSSLTSDDTAIYYCARDPYVYAGDDVWSLSRWGQGTPVTVSSAS

SEQ ID NO: 1065 - protein, 127 aa, Artificial Sequence
  B7 Heavy Chain
EVQLLEQSGAEVKKPGSSVKVSCRASGSPYSSYTITWVRQAPGQGLEWMGGIILMTGKANYAQKFQGRVTITADRATATAYMEMSSLTSDDTAIYYCARDPYVYAGDDVWSLSRWGQGTPVIVSSAS

SEQ ID NO: 1066 - protein, 122 aa, Artificial Sequence
  E2 Heavy Chain
EVGLLEQSGAELKKPGSSVKVSCKPSDGTFRAYTLSWVRQAPGQTLEWLGRIMPTVGITNYAQKFQGRVTISADMSTATAYMQLSSLRPDDTAIYYCAKGPYVGLGEGFSEWGQGTLVTVSS

SEQ ID NO: 1067 - protein, 122 aa, Artificial Sequence
  E3 Heavy Chain
EVGLLEQSGAELKKPGSSVKVSCKPSDGTFRAYTLSWVRQAPGQALEWMGRIMPTVGITNYARKFQGRVTISADMSTATAYMELSSLRSDDTAIYYCAKGPYVGLGEGFSEWGQGTLVTVSS

SEQ ID NO: 1068 - protein, 122 aa, Artificial Sequence
  E4 Heavy Chain
EVGLLEQSGAELKKPGSSVKVSCKPSDGTFRAYTLSWVRQAPGQTLEWMGRIMPTVGITNYAQKFQGRVTISADMSTATAYMELSSLRSDDTAIYYCGKGPYVGLGEGFSEWGQGTLVTVSS

SEQ ID NO: 1069 - protein, 129 aa, Artificial Sequence
  J5 Heavy Chain
EVQLLEQSGAEVKKPGSSVTVSCKASGGTVSSYPITWVRQAPGQGLEWMGGTIPVFGAPKYAPKFQGRVTITADESTSTAYMELRSLRSDDTAMYYCAIVGMRGITLVGGLAMNWLDPWGQGTLVIVSS

SEQ ID NO: 1070 - protein, 132 aa, Artificial Sequence
  L5 Heavy Chain
EVQLLEQSGTEVKKPGSSVKVSCKVPGDTFRSYVITWVRQAPGQGLEWLGGILPFFGTTNLAQKFQGRVTLTADESTTTAYMELSSLRAEDTAVYYCAKAGDLAFGGVIAGGVPHLSHFDPWGQGTLVTVSS

SEQ ID NO: 1071 - protein, 132 aa, Artificial Sequence
  L6 Heavy Chain
EVQLLEQSGTEVKKPGSSVKVSCKVPGDTFRSYVITWVRQSPGQGLEWLGGILPFFGTTNLAQKFQGRVTLTADESTTTAYMELSSLRSEDTAVYYCAKAGDLAFGGVIAGGVPHLSHFDPWGQGTLVTVSA

SEQ ID NO: 1072 - protein, 132 aa, Artificial Sequence
  L7 Heavy Chain
EVQLLEQSGAEVKKPGSSVKVTCKVPGDTFRSYVITWVRQAPGQGLEWLGGILPFFGTTNLAQKFQGRVTLTADESTTTAYMELSSLRAEDTAVYYCAKAGDLAFGGVIAGGVPHLSHFDPWGQGTLVTVSS

SEQ ID NO: 1073 - protein, 132 aa, Artificial Sequence
  S2 Heavy Chain
EVQLLEQSGAEVKKPGASVKVSCTASGYIFTSFGISWVRQAPGQGLEWMGRIDTYNGKTNYAQKLQGRVTMTTDTYTSTAYMELRSLTSDDTAVYYCARDDCRSSTCYLAQHNWQAYYHDSWGQGTLVTVSS

SEQ ID NO: 1074 - protein, 125 aa, Artificial Sequence
  U2 Heavy Chain
EVQLLEQSGAEVKRPGSSVKLSCKNSGGTFITQAMSWVRQAPGQGLEWMGGIIPVFGTVNYAQNILDRATATADEDTFSLELRGLRLEDTAVYYCAREVNLKTWNLARPDVFDIWGPGTLVTVSS

SEQ ID NO: 1075 - protein, 125 aa, Artificial Sequence
  U3 Heavy Chain
EVQLLEQSGAEVKRPGSSVKISCKNSGGTFITQAMSWVRQAPGQGLEWMGGIIPIFGTVNYAQKILGRVTITADEDTVSMELSSLGFEDTAVYYCAREVNLKSWNLAHPDVFDIWGQGTLVTVSS

SEQ ID NO: 1076 - protein, 110 aa, Artificial Sequence
  B4 Light Chain
ELTLTQSPGTLSLSPGKRATLSCRASQSVSGSYLAWYQQKPGQAPRLLIYGASNRATGIPHRFSGSGSGTDFTLTISRLEPEDFAVYYCQQYGSSPPTFGQGTRVDIKRT

SEQ ID NO: 1077 - protein, 113 aa, Artificial Sequence
  B5 Light Chain
ELTQSPLSLPVIIGQPASISCSSSESLVDSDGNTYLHWFQQRPGQSPRRLIYKVSNRDAGVPDRFSGSGSGTDFTLKISRVEAEDVAVYYCMQATHWPPITFGPGTRLEVKRT

SEQ ID NO: 1078 - protein, 107 aa, Artificial Sequence
  B6a Light Chain
LTQSPGTLSLSPGERATLSCRASQSVASNYVAWYQQKPGQAPRLLIYGTSYRATGIPGRFSGSGSGTDFTLTISGLEPEDFAVYYCQQYGSSPQTFGQGTKVEIKRT

SEQ ID NO: 1079 - protein, 112 aa, Artificial Sequence
  B7 Light Chain
ELTQSPLSLPVTLGQPASISCRSSQSLVYSDGNTYLNWFQQRPGQSPRRLIYKVSNRDSGVPDRFSGSGSGTDFTLKISRVEAEDVGVYYCMQGTHWPPTFGQGTKVDIKRT

SEQ ID NO: 1080 - protein, 112 aa, Artificial Sequence
  E2 Light Chain
ELTQSPLSLPVTLGQPASISCRSSQSLVYSDGNTYLIWFQQRPGQSPRRLIYNVSNRDSGVPDRFSGSGSGTDFTLKISRVEAEDLGVYYCMQGAHWPPTFGQGTRLEIKGT

SEQ ID NO: 1081 - protein, 114 aa, Artificial Sequence
  E3 Light Chain
ELVLTQSPLSLPVTLGQPASISCRSTQSLVYSDGNTYLNWFHQRPGQPPRRLIYKVSNRDSGVPERFSGSGSGTDFALKISRVEADDVGIYYCMQGAHWPPTFGGGTKVEISRT

SEQ ID NO: 1082 - protein, 107 aa, Artificial Sequence
  B6b Light Chain
ELTQSPGTLSLSPGERATLSCRASQSVSRGNLAWYQQKRGQPPRLLIYGASYRATGIPDRFSGSGSGTDFTLTITKLEPEDFAVYYCQQYGHSLAFGQGTKVEIKGT

SEQ ID NO: 1083 - protein, 108 aa, Artificial Sequence
  J5 Light Chain
ELTQSPGTLSLSPGERATLSCRASQSVSSNYLAWYQQKPGQAPRLLIYGASSRATGIPDRFSGSGSGTDFTLSISRLEPEDFAVYYCQQYGSSPLTFGGGTKVEIKRT

SEQ ID NO: 1084 - protein, 108 aa, Artificial Sequence
  L5 Light Chain
ELTQSPGTLSLSPGERATLSCRASQSVRSNYLAWYQQKPGQAPRLLIYGASSRATGIPDRFSGSGSGTDFTLTISRLEPEDFAMYYCQQYGSSMCSFGQGTKVEIKRT

SEQ ID NO: 1085 - protein, 107 aa, Artificial Sequence
  L6 Light Chain
ELTQSPGTLSLSPGERATLSCRASQSVSSSYLAWYQQKPGQAPRLLIYGASSRATGIPDRFSGSGSGTDFTLTISRLEPEDFAVYYCQQYGSSVTFGPGTKVDIKRT

SEQ ID NO: 1086 - protein, 107 aa, Artificial Sequence
  L7 Light Chain
ELTQSPGTLSLSPGERATLSCRASQSVPSSYLGWYQQKPGQAPRLLIYGASSRATGIPERFSGSGSGTDFTLTISRLEPEDFAVYYCQQYGSSLSFGQGTKVDLKRT

SEQ ID NO: 1087 - protein, 108 aa, Artificial Sequence
  S2 Light Chain
ELTQSPATLSLSPGERATLSCRASQSVSSRFLAWYQQKPGQAPRLLIYGASSRATGIPDRFSGSGSGTDFTLTISRLEPEDFAVYYCQQYGSSPQTFGQGTKVEIKRT

SEQ ID NO: 1088 - protein, 108 aa, Artificial Sequence
  U2 Light Chain
ELTQSPSSLSASIGDRVTIPCRASQSILNHLNWYQQKPGQPPKLLIFAASNLQSGVPSRFSGSGSGTDFTLTISSLQTEDFATYYCQQSYSTPRTFGQGTKVEVKRTQ

SEQ ID NO: 1089 - protein, 107 aa, Artificial Sequence
  U3 Light Chain
ELTQSPSSLSASVGDRVTITCRASQSIRSYLNWYQQKPGKAPNLLIYSASNLQSGVPSRFRGSGSGTDFTLTISSLQPEDFATYYCQQSYRTPRTFGQGTKVESKRT

SEQ ID NO: 1090 - protein, 5 aa, Artificial Sequence
  J5 CDRH1
SYPIT

SEQ ID NO: 1091 - protein, 5 aa, Artificial Sequence
  U2 CDRH1
TQAMT

SEQ ID NO: 1092 - protein, 17 aa, Artificial Sequence
  E3 CDRH2
RIMPTVGITNYARKFQG

SEQ ID NO: 1093 - protein, 17 aa, Artificial Sequence
  J5 CDRH2
GTIPVFGAPKYAPKFQG

SEQ ID NO: 1094 - protein, 17 aa, Artificial Sequence
  L5, L6 and L7 CDRH2
GILPFFGTTNLAQKFQG

SEQ ID NO: 1095 - protein, 17 aa, Artificial Sequence
  U2 CDRH2
GIIPVFGTVNYAQNILD

SEQ ID NO: 1096 - protein, 17 aa, Artificial Sequence
  U3 CDRH2
GIIPIFGTVNYAQKILG

SEQ ID NO: 1097 - protein, 19 aa, Artificial Sequence
  J5 CDRH3
VGMRGITLVGGLAMNWLDP

SEQ ID NO: 1098 - protein, 22 aa, Artificial Sequence
  L5, L6 and L7 CDRH3
AGDLAFGGVIAGGVPHLSHFDP

SEQ ID NO: 1099 - protein, 17 aa, Artificial Sequence
  U2 CDRH3
EVNLKTWNLARPDVFDI

SEQ ID NO: 1100 - protein, 17 aa, Artificial Sequence
  U3 CDRH3
EVNLKSWNLAHPDVFDI

SEQ ID NO: 1101 - protein, 12 aa, Artificial Sequence
  B4 CDRL1
RASQSVSGSYLA

SEQ ID NO: 1102 - protein, 16 aa, Artificial Sequence
  B5 CDRL1
SSSESLVDSDGNTYLH

SEQ ID NO: 1103 - protein, 12 aa, Artificial Sequence
  B6a CDRL1
RASQSVASNYVA

SEQ ID NO: 1104 - protein, 16 aa, Artificial Sequence
  B7 CDRL1
RSSQSLVYSDGNTYLN

SEQ ID NO: 1105 - protein, 16 aa, Artificial Sequence
  E2 CDRL1
RSSQSLVYSDGNTYLI

SEQ ID NO: 1106 - protein, 16 aa, Artificial Sequence
  E3 CDRL1
RSTQSLVYSDGNTYLN

SEQ ID NO: 1107 - protein, 12 aa, Artificial Sequence
  B6b CDRL1
RASQSVSRGNLA

SEQ ID NO: 1108 - protein, 12 aa, Artificial Sequence
  J5 CDRL1
RASQSVSSNYLA

SEQ ID NO: 1109 - protein, 12 aa, Artificial Sequence
  L5 CDRL1
RASQSVRSNYLA

SEQ ID NO: 1110 - protein, 12 aa, Artificial Sequence
  L7 CDRL1
RASQSVPSSYLG

SEQ ID NO: 1111 - protein, 12 aa, Artificial Sequence
  S2 CDRL1
RASQSVSSRFLA

SEQ ID NO: 1112 - protein, 11 aa, Artificial Sequence
  U2 CDRL1
RASQSILNHLN

SEQ ID NO: 1113 - protein, 11 aa, Artificial Sequence
  U3 CDRL1
RASQSIRSYLN

SEQ ID NO: 1114 - protein, 7 aa, Artificial Sequence
  B4 CDRL2
GASNRAT

SEQ ID NO: 1115 - protein, 7 aa, Artificial Sequence
  B5 CDRL2
KVSNRDA

SEQ ID NO: 1116 - protein, 7 aa, Artificial Sequence
  B6a CDRL2
GTSYRAT

SEQ ID NO: 1117 - protein, 7 aa, Artificial Sequence
  E2 CDRL2
NVSNRDS

SEQ ID NO: 1118 - protein, 7 aa, Artificial Sequence
  E3 CDRL2
ELVLTQS

SEQ ID NO: 1119 - protein, 7 aa, Artificial Sequence
  B6b CDRL2
GASYRAT

SEQ ID NO: 1120 - protein, 7 aa, Artificial Sequence
  U2 CDRL2
AASNLQS

SEQ ID NO: 1121 - protein, 7 aa, Artificial Sequence
  U3 CDRL2
SASNLQS

SEQ ID NO: 1122 - protein, 9 aa, Artificial Sequence
  B4 CDRL3
QQYGSSPPT

SEQ ID NO: 1123 - protein, 10 aa, Artificial Sequence
  B5 CDRL3
MQATHWPPIT

SEQ ID NO: 1124 - protein, 9 aa, Artificial Sequence
  B6a CDRL3
QQYGSSPQT

SEQ ID NO: 1125 - protein, 9 aa, Artificial Sequence
  B7 CDRL3
MQGTHWPPT

SEQ ID NO: 1126 - protein, 9 aa, Artificial Sequence
  E2 CDRL3
MQGAHWPPT

SEQ ID NO: 1127 - protein, 9 aa, Artificial Sequence
  E3 CDRL3
MQGAHWPPT

SEQ ID NO: 1128 - protein, 8 aa, Artificial Sequence
  B6b CDRL3
QQYGHSLA

SEQ ID NO: 1129 - protein, 9 aa, Artificial Sequence
  J5 CDRL3
QQYGSSPLT

SEQ ID NO: 1130 - protein, 9 aa, Artificial Sequence
  L5 CDRL3
QQYGSSMCS

SEQ ID NO: 1131 - protein, 8 aa, Artificial Sequence
  L6 CDRL3
QQYGSSVT

SEQ ID NO: 1132 - protein, 8 aa, Artificial Sequence
  L7 CDRL3
QQYGSSLS

SEQ ID NO: 1133 - protein, 9 aa, Artificial Sequence
  U3 CDRL3
QQSYRTPRT

SEQ ID NO: 1134 - protein, 31 aa, Artificial Sequence
  B4 Heavy FW1
EVQLLEQSGAEVKKPGSSVKVSCRASGSPFS

SEQ ID NO: 1135 - protein, 30 aa, Artificial Sequence
  B5 Heavy FW1
EVQLLESGAEVKKPGSSVKVSCRASGSPYS

SEQ ID NO: 1136 - protein, 31 aa, Artificial Sequence
  B6 Heavy FW1
EVQLLEQSGAEVKKPGSSVKVSCRASGSPYS

SEQ ID NO: 1137 - protein, 31 aa, Artificial Sequence
  E2 Heavy FW1
EVGLLEQSGAELKKPGSSVKVSCKPSDGTFR

SEQ ID NO: 1138 - protein, 31 aa, Artificial Sequence
  J5 Heavy FW1
EVQLLEQSGAEVKKPGSSVTVSCKASGGTVS

SEQ ID NO: 1139 - protein, 31 aa, Artificial Sequence
  L5 Heavy FW1
EVQLLEQSGTEVKKPGSSVKVSCKVPGDTFR

SEQ ID NO: 1140 - protein, 31 aa, Artificial Sequence
  L7 Heavy FW1
EVQLLEQSGAEVKKPGSSVKVTCKVPGDTFR

SEQ ID NO: 1141 - protein, 31 aa, Artificial Sequence
  S2 Heavy FW1
EVQLLEQSGAEVKKPGASVKVSCTASGYIFT

SEQ ID NO: 1142 - protein, 31 aa, Artificial Sequence
  U2 Heavy FW1
EVQLLEQSGAEVKRPGSSVKLSCKNSGGTFI

SEQ ID NO: 1143 - protein, 31 aa, Artificial Sequence
  U3 Heavy FW1
EVQLLEQSGAEVKRPGSSVKISCKNSGGTFI

SEQ ID NO: 1144 - protein, 14 aa, Artificial Sequence
  E2 Heavy FW2
WVRQAPGQTLEWLG

SEQ ID NO: 1145 - protein, 14 aa, Artificial Sequence
  E3 Heavy FW2
WVRQAPGQALEWMG

SEQ ID NO: 1146 - protein, 14 aa, Artificial Sequence
  L5 Heavy FW2
WVRQAPGQGLEWLG

SEQ ID NO: 1147 - protein, 14 aa, Artificial Sequence
  L6 Heavy FW2
WVRQSPGQGLEWLG

SEQ ID NO: 1148 - protein, 32 aa, Artificial Sequence
  B4 Heavy FW3
RVTITADRSTTTAYMEMSSPTSDDTAIYYCAR

SEQ ID NO: 1149 - protein, 32 aa, Artificial Sequence; identical to SEQ ID NO: 373
  B5 Heavy FW3

SEQ ID NO: 1150 - protein, 32 aa, Artificial Sequence
  E2 Heavy FW3
RVTISADMSTATAYMQLSSLRPDDTAIYYCAK

SEQ ID NO: 1151 - protein, 32 aa, Artificial Sequence
  E4 Heavy FW3
RVTISADMSTATAYMELSSLRSDDTAIYYCGK

SEQ ID NO: 1152 - protein, 32 aa, Artificial Sequence
  J5 Heavy FW3
RVTITADESTSTAYMELRSLRSDDTAMYYCAI

SEQ ID NO: 1153 - protein, 32 aa, Artificial Sequence
  L5 Heavy FW3
RVTLTADESTTTAYMELSSLRAEDTAVYYCAK

SEQ ID NO: 1154 - protein, 32 aa, Artificial Sequence
  L6 Heavy FW3
RVTLTADESTTTAYMELSSLRSEDTAVYYCAK

SEQ ID NO: 1155 - protein, 30 aa, Artificial Sequence
  U2 Heavy FW3
RATATADEDTFSLELRGLRLEDTAVYYCAR

SEQ ID NO: 1156 - protein, 30 aa, Artificial Sequence
  U3 Heavy FW3
RVTITADEDTVSMELSSLGFEDTAVYYCAR

SEQ ID NO: 1157 - protein, 11 aa, Artificial Sequence
  B4 Heavy FW4
WGQGTLVIVSP

SEQ ID NO: 1158 - protein, 11 aa, Artificial Sequence
  B5 Heavy FW4
WGQGTPVIVSS

SEQ ID NO: 1159 - protein, 11 aa, Artificial Sequence
  B6 Heavy FW4
WGQGTPVTVSS

SEQ ID NO: 1160 - protein, 11 aa, Artificial Sequence
  E2 Heavy FW4
WGQGTLVTVSS

SEQ ID NO: 1161 - protein, 11 aa, Artificial Sequence
  J5 Heavy FW4
WGQGTLVIVSS

SEQ ID NO: 1162 - protein, 11 aa, Artificial Sequence
  L6 Heavy FW4
WGQGTLVTVSA

SEQ ID NO: 1163 - protein, 11 aa, Artificial Sequence
  U2 Heavy FW4
WGPGTLVTVSS

SEQ ID NO: 1164 - protein, 11 aa, Artificial Sequence
  U3 Heavy FW4
WGQGTLVTVSS

SEQ ID NO: 1165 - protein, 23 aa, Artificial Sequence
  B4 Light FW1
ELTLTQSPGTLSLSPGKRATLSC

SEQ ID NO: 1166 - protein, 21 aa, Artificial Sequence
  B5 Light FW1
ELTQSPLSLPVIIGQPASISC

SEQ ID NO: 1167 - protein, 20 aa, Artificial Sequence
  B6a Light FW1
LTQSPGTLSLSPGERATLSC

SEQ ID NO: 1168 - protein, 21 aa, Artificial Sequence
  B7 Light FW1
ELTQSPLSLPVTLGQPASISC

SEQ ID NO: 1169 - protein, 21 aa, Artificial Sequence
  E2 Light FW1
ELTQSPLSLPVTLGQPASISC

SEQ ID NO: 1170 - protein, 23 aa, Artificial Sequence
  E3 Light FW1
ELVLTQSPLSLPVTLGQPASISC

SEQ ID NO: 1171 - protein, 21 aa, Artificial Sequence
  B6b Light FW1
ELTQSPGTLSLSPGERATLSC

SEQ ID NO: 1172 - protein, 21 aa, Artificial Sequence
  S2 Light FW1
ELTQSPATLSLSPGERATLSC

SEQ ID NO: 1173 - protein, 21 aa, Artificial Sequence
  U2 Light FW1
ELTQSPSSLSASIGDRVTIPC

SEQ ID NO: 1174 - protein, 15 aa, Artificial Sequence
  B5 Light FW2
WFQQRPGQSPRRLIY

SEQ ID NO: 1175 - protein, 15 aa, Artificial Sequence
  B6a Light FW2
WYQQKPGQAPRLLIY

SEQ ID NO: 1176 - protein, 15 aa, Artificial Sequence
  B7 Light FW2
WFQQRPGQSPRRLIY

SEQ ID NO: 1177 - protein, 15 aa, Artificial Sequence
  E2 Light FW2
WFQQRPGQSPRRLIY

SEQ ID NO: 1178 - protein, 15 aa, Artificial Sequence
  E3 Light FW2
WFHQRPGQPPRRLIY

SEQ ID NO: 1179 - protein, 15 aa, Artificial Sequence
  B6b Light FW2
WYQQKRGQPPRLLIY

SEQ ID NO: 1180 - protein, 15 aa, Artificial Sequence
  U2 Light FW2
WYQQKPGQPPKLLIF

SEQ ID NO: 1181 - protein, 15 aa, Artificial Sequence
  U3 Light FW2
WYQQKPGKAPNLLIY

SEQ ID NO: 1182 - protein, 32 aa, Artificial Sequence; identical to SEQ ID NO: 507
  B4 Light FW3

SEQ ID NO: 1183 - protein, 32 aa, Artificial Sequence
  B5 Light FW3
GVPDRFSGSGSGTDFTLKISRVEAEDVAVYYC

SEQ ID NO: 1184 - protein, 32 aa, Artificial Sequence
  B6a Light FW3
GIPGRFSGSGSGTDFTLTISGLEPEDFAVYYC

SEQ ID NO: 1185 - protein, 32 aa, Artificial Sequence; identical to SEQ ID NO: 521
  B7 Light FW3

SEQ ID NO: 1186 - protein, 32 aa, Artificial Sequence
  E2 Light FW3
GVPDRFSGSGSGTDFTLKISRVEAEDLGVYYC

SEQ ID NO: 1187 - protein, 32 aa, Artificial Sequence
  E3 Light FW3
GVPERFSGSGSGTDFALKISRVEADDVGIYYC

SEQ ID NO: 1188 - protein, 32 aa, Artificial Sequence
  B6b Light FW3
GIPDRFSGSGSGTDFTLTITKLEPEDFAVYYC

SEQ ID NO: 1189 - protein, 32 aa, Artificial Sequence
  J5 Light FW3
GIPDRFSGSGSGTDFTLSISRLEPEDFAVYYC

SEQ ID NO: 1190 - protein, 32 aa, Artificial Sequence
  L5 Light FW3
GIPDRFSGSGSGTDFTLTISRLEPEDFAMYYC

SEQ ID NO: 1191 - protein, 32 aa, Artificial Sequence
  L7 Light FW3
GIPERFSGSGSGTDFTLTISRLEPEDFAVYYC

SEQ ID NO: 1192 - protein, 32 aa, Artificial Sequence
  U2 Light FW3
GVPSRFSGSGSGTDFTLTISSLQTEDFATYYC

SEQ ID NO: 1193 - protein, 32 aa, Artificial Sequence
  U3 Light FW3
GVPSRFRGSGSGTDFTLTISSLQPEDFATYYC

SEQ ID NO: 1194 - protein, 12 aa, Artificial Sequence
  B4 Light FW4
FGQGTRVDIKRT

SEQ ID NO: 1195-1196 - skipped (2 entries)

SEQ ID NO: 1197 - protein, 12 aa, Artificial Sequence
  B7 Light FW4
FGQGTKVDIKRT

SEQ ID NO: 1198-1200 - skipped (3 entries)

SEQ ID NO: 1201 - protein, 12 aa, Artificial Sequence
  J5 Light FW4
FGGGTKVEIKRT

SEQ ID NO: 1202 - protein, 12 aa, Artificial Sequence
  L6 Light FW4
FGPGTKVDIKRT

SEQ ID NO: 1203 - protein, 12 aa, Artificial Sequence
  L7 Light FW4
FGQGTKVDLKRT

SEQ ID NO: 1204 - protein, 12 aa, Artificial Sequence
  U2 Light FW4
FGQGTKVEVKRT

SEQ ID NO: 1205 - protein, 12 aa, Artificial Sequence
  U3 Light FW4
FGQGTKVESKRT

SEQ ID NO: 1206 - protein, 192 aa, Artificial Sequence
  E1 N196A/N209A
YQVRASSGLYHVTNDCPASSIVYEAADAILHTPGCVPCVREGNASRCWVAVTPTVATRDGKLPTTQLRRHIDLLVGSATLCSALYVGDLCGSVFLVGQLFTFSPRRHWTTQDCNCSIYPGHITGHRMAWDMMMNWSPTAALVVAQLLRIPQAIMDMIAGAHWGVLAGIAYFSMVGNWAKVLVVLLLFAGVDA

SEQ ID NO: 1207 - protein, 192 aa, Artificial Sequence
  E1 N196A/N234A
YQVRASSGLYHVTNDCPNSSIVYEAADAILHTPGCVPCVREGAASRCWVAVTPTVATRDGKLPTTQLRRHIDLLVGSATLCSALYVGDLCGSVFLVGQLFTFSPRRHWTTQDCNCSIYPGHITGHRMAWDMMMNWSPTAALVVAQLLRIPQAIMDMIAGAHWGVLAGIAYFSMVGNWAKVLVVLLLFAGVDA

SEQ ID NO: 1208 - protein, 192 aa, Artificial Sequence
  E1 N196A/N305A
YQVRASSGLYHVTNDCPNSSIVYEAADAILHTPGCVPCVREGNASRCWVAVTPTVATRDGKLPTTQLRRHIDLLVGSATLCSALYVGDLCGSVFLVGQLFTFSPRRHWTTQDCACSIYPGHITGHRMAWDMMMNWSPTAALVVAQLLRIPQAIMDMIAGAHWGVLAGIAYFSMVGNWAKVLVVLLLFAGVDA

SEQ ID NO: 1209 - protein, 192 aa, Artificial Sequence
  E1 N196A/N325A
YQVRASSGLYHVTNDCPNSSIVYEAADAILHTPGCVPCVREGNASRCWVAVTPTVATRDGKLPTTQLRRHIDLLVGSATLCSALYVGDLCGSVFLVGQLFTFSPRRHWTTQDCNCSIYPGHITGHRMAWDMMMAWSPTAALVVAQLLRIPQAIMDMIAGAHWGVLAGIAYFSMVGNWAKVLVVLLLFAGVDA

SEQ ID NO: 1210 - protein, 192 aa, Artificial Sequence
  E1 N305A/N209A
YQVRNSSGLYHVTNDCPASSIVYEAADAILHTPGCVPCVREGNASRCWVAVTPTVATRDGKLPTTQLRRHIDLLVGSATLCSALYVGDLCGSVFLVGQLFTFSPRRHWTTQDCACSIYPGHITGHRMAWDMMMNWSPTAALVVAQLLRIPQAIMDMIAGAHWGVLAGIAYFSMVGNWAKVLVVLLLFAGVDA

SEQ ID NO: 1211 - protein, 192 aa, Artificial Sequence
  E1 N305A/N234A
YQVRNSSGLYHVTNDCPNSSIVYEAADAILHTPGCVPCVREGAASRCWVAVTPTVATRDGKLPTTQLRRHIDLLVGSATLCSALYVGDLCGSVFLVGQLFTFSPRRHWTTQDCACSIYPGHITGHRMAWDMMMNWSPTAALVVAQLLRIPQAIMDMIAGAHWGVLAGIAYFSMVGNWAKVLVVLLLFAGVDA

SEQ ID NO: 1212 - protein, 192 aa, Artificial Sequence
  E1 N305A/N325A
YQVRNSSGLYHVTNDCPNSSIVYEAADAILHTPGCVPCVREGNASRCWVAVTPTVATRDGKLPTTQLRRHIDLLVGSATLCSALYVGDLCGSVFLVGQLFTFSPRRHWTTQDCACSIYPGHITGHRMAWDMMMAWSPTAALVVAQLLRIPQAIMDMIAGAHWGVLAGIAYFSMVGNWAKVLVVLLLFAGVDA

SEQ ID NO: 1213 - protein, 192 aa, Artificial Sequence
  E1 Y192A
AQVRNSSGLYHVTNDCPNSSIVYEAADAILHTPGCVPCVREGNASRCWVAVTPTVATRDGKLPTTQLRRHIDLLVGSATLCSALYVGDLCGSVFLVGQLFTFSPRRHWTTQDCNCSIYPGHITGHRMAWDMMMNWSPTAALVVAQLLRIPQAIMDMIAGAHWGVLAGIAYFSMVGNWAKVLVVLLLFAGVDA

SEQ ID NO: 1214 - protein, 192 aa, Artificial Sequence
  E1 Q193A
YAVRNSSGLYHVTNDCPNSSIVYEAADAILHTPGCVPCVREGNASRCWVAVTPTVATRDGKLPTTQLRRHIDLLVGSATLCSALYVGDLCGSVFLVGQLFTFSPRRHWTTQDCNCSIYPGHITGHRMAWDMMMNWSPTAALVVAQLLRIPQAIMDMIAGAHWGVLAGIAYFSMVGNWAKVLVVLLLFAGVDA

SEQ ID NO: 1215 - protein, 192 aa, Artificial Sequence
  E1 V194A
YQARNSSGLYHVTNDCPNSSIVYEAADAILHTPGCVPCVREGNASRCWVAVTPTVATRDGKLPTTQLRRHIDLLVGSATLCSALYVGDLCGSVFLVGQLFTFSPRRHWTTQDCNCSIYPGHITGHRMAWDMMMNWSPTAALVVAQLLRIPQAIMDMIAGAHWGVLAGIAYFSMVGNWAKVLVVLLLFAGVDA

SEQ ID NO: 1216 - protein, 192 aa, Artificial Sequence
  E1 R195A
YQVANSSGLYHVTNDCPNSSIVYEAADAILHTPGCVPCVREGNASRCWVAVTPTVATRDGKLPTTQLRRHIDLLVGSATLCSALYVGDLCGSVFLVGQLFTFSPRRHWTTQDCNCSIYPGHITGHRMAWDMMMNWSPTAALVVAQLLRIPQAIMDMIAGAHWGVLAGIAYFSMVGNWAKVLVVLLLFAGVDA

SEQ ID NO: 1217 - protein, 192 aa, Artificial Sequence
  E1 N196A
YQVRASSGLYHVTNDCPNSSIVYEAADAILHTPGCVPCVREGNASRCWVAVTPTVATRDGKLPTTQLRRHIDLLVGSATLCSALYVGDLCGSVFLVGQLFTFSPRRHWTTQDCNCSIYPGHITGHRMAWDMMMNWSPTAALVVAQLLRIPQAIMDMIAGAHWGVLAGIAYFSMVGNWAKVLVVLLLFAGVDA

SEQ ID NO: 1218 - protein, 192 aa, Artificial Sequence
  E1 S198A
YQVRNSAGLYHVTNDCPNSSIVYEAADAILHTPGCVPCVREGNASRCWVAVTPTVATRDGKLPTTQLRRHIDLLVGSATLCSALYVGDLCGSVFLVGQLFTFSPRRHWTTQDCNCSIYPGHITGHRMAWDMMMNWSPTAALVVAQLLRIPQAIMDMIAGAHWGVLAGIAYFSMVGNWAKVLVVLLLFAGVDA

SEQ ID NO: 1219 - protein, 192 aa, Artificial Sequence
  E1 Y201A
YQVRNSSGLAHVTNDCPNSSIVYEAADAILHTPGCVPCVREGNASRCWVAVTPTVATRDGKLPTTQLRRHIDLLVGSATLCSALYVGDLCGSVFLVGQLFTFSPRRHWTTQDCNCSIYPGHITGHRMAWDMMMNWSPTAALVVAQLLRIPQAIMDMIAGAHWGVLAGIAYFSMVGNWAKVLVVLLLFAGVDA

SEQ ID NO: 1220 - protein, 192 aa, Artificial Sequence
  E1 T204A
YQVRNSSGLYHVANDCPNSSIVYEAADAILHTPGCVPCVREGNASRCWVAVTPTVATRDGKLPTTQLRRHIDLLVGSATLCSALYVGDLCGSVFLVGQLFTFSPRRHWTTQDCNCSIYPGHITGHRMAWDMMMNWSPTAALVVAQLLRIPQAIMDMIAGAHWGVLAGIAYFSMVGNWAKVLVVLLLFAGVDA

SEQ ID NO: 1221 - protein, 192 aa, Artificial Sequence
  E1 N205A
YQVRNSSGLYHVTADCPNSSIVYEAADAILHTPGCVPCVREGNASRCWVAVTPTVATRDGKLPTTQLRRHIDLLVGSATLCSALYVGDLCGSVFLVGQLFTFSPRRHWTTQDCNCSIYPGHITGHRMAWDMMMNWSPTAALVVAQLLRIPQAIMDMIAGAHWGVLAGIAYFSMVGNWAKVLVVLLLFAGVDA

SEQ ID NO: 1222 - protein, 192 aa, Artificial Sequence
  E1 D206A
YQVRNSSGLYHVTNACPNSSIVYEAADAILHTPGCVPCVREGNASRCWVAVTPTVATRDGKLPTTQLRRHIDLLVGSATLCSALYVGDLCGSVFLVGQLFTFSPRRHWTTQDCNCSIYPGHITGHRMAWDMMMNWSPTAALVVAQLLRIPQAIMDMIAGAHWGVLAGIAYFSMVGNWAKVLVVLLLFAGVDA

SEQ ID NO: 1223 - protein, 192 aa, Artificial Sequence
  E1 N209A
YQVRNSSGLYHVTNDCPASSIVYEAADAILHTPGCVPCVREGNASRCWVAVTPTVATRDGKLPTTQLRRHIDLLVGSATLCSALYVGDLCGSVFLVGQLFTFSPRRHWTTQDCNCSIYPGHITGHRMAWDMMMNWSPTAALVVAQLLRIPQAIMDMIAGAHWGVLAGIAYFSMVGNWAKVLVVLLLFAGVDA

SEQ ID NO: 1224 - protein, 192 aa, Artificial Sequence
  E1 S211A
YQVRNSSGLYHVTNDCPNSAIVYEAADAILHTPGCVPCVREGNASRCWVAVTPTVATRDGKLPTTQLRRHIDLLVGSATLCSALYVGDLCGSVFLVGQLFTFSPRRHWTTQDCNCSIYPGHITGHRMAWDMMMNWSPTAALVVAQLLRIPQAIMDMIAGAHWGVLAGIAYFSMVGNWAKVLVVLLLFAGVDA

SEQ ID NO: 1225 - protein, 192 aa, Artificial Sequence
  E1 I212A
YQVRNSSGLYHVTNDCPNSSAVYEAADAILHTPGCVPCVREGNASRCWVAVTPTVATRDGKLPTTQLRRHIDLLVGSATLCSALYVGDLCGSVFLVGQLFTFSPRRHWTTQDCNCSIYPGHITGHRMAWDMMMNWSPTAALVVAQLLRIPQAIMDMIAGAHWGVLAGIAYFSMVGNWAKVLVVLLLFAGVDA

SEQ ID NO: 1226 - protein, 192 aa, Artificial Sequence
  E1 L221A
YQVRNSSGLYHVTNDCPNSSIVYEAADAIAHTPGCVPCVREGNASRCWVAVTPTVATRDGKLPTTQLRRHIDLLVGSATLCSALYVGDLCGSVFLVGQLFTFSPRRHWTTQDCNCSIYPGHITGHRMAWDMMMNWSPTAALVVAQLLRIPQAIMDMIAGAHWGVLAGIAYFSMVGNWAKVLVVLLLFAGVDA

SEQ ID NO: 1227 - protein, 192 aa, Artificial Sequence
  E1 H222A
YQVRNSSGLYHVTNDCPNSSIVYEAADAILATPGCVPCVREGNASRCWVAVTPTVATRDGKLPTTQLRRHIDLLVGSATLCSALYVGDLCGSVFLVGQLFTFSPRRHWTTQDCNCSIYPGHITGHRMAWDMMMNWSPTAALVVAQLLRIPQAIMDMIAGAHWGVLAGIAYFSMVGNWAKVLVVLLLFAGVDA

SEQ ID NO: 1228 - protein, 192 aa, Artificial Sequence
  E1 P224A
YQVRNSSGLYHVTNDCPNSSIVYEAADAILHTAGCVPCVREGNASRCWVAVTPTVATRDGKLPTTQLRRHIDLLVGSATLCSALYVGDLCGSVFLVGQLFTFSPRRHWTTQDCNCSIYPGHITGHRMAWDMMMNWSPTAALVVAQLLRIPQAIMDMIAGAHWGVLAGIAYFSMVGNWAKVLVVLLLFAGVDA

SEQ ID NO: 1229 - protein, 192 aa, Artificial Sequence
  E1 G225A
YQVRNSSGLYHVTNDCPNSSIVYEAADAILHTPACVPCVREGNASRCWVAVTPTVATRDGKLPTTQLRRHIDLLVGSATLCSALYVGDLCGSVFLVGQLFTFSPRRHWTTQDCNCSIYPGHITGHRMAWDMMMNWSPTAALVVAQLLRIPQAIMDMIAGAHWGVLAGIAYFSMVGNWAKVLVVLLLFAGVDA

SEQ ID NO: 1230 - protein, 192 aa, Artificial Sequence
  E1 V227A
YQVRNSSGLYHVTNDCPNSSIVYEAADAILHTPGCAPCVREGNASRCWVAVTPTVATRDGKLPTTQLRRHIDLLVGSATLCSALYVGDLCGSVFLVGQLFTFSPRRHWTTQDCNCSIYPGHITGHRMAWDMMMNWSPTAALVVAQLLRIPQAIMDMIAGAHWGVLAGIAYFSMVGNWAKVLVVLLLFAGVDA

SEQ ID NO: 1231 - protein, 192 aa, Artificial Sequence
  E1 P228A
YQVRNSSGLYHVTNDCPNSSIVYEAADAILHTPGCVACVREGNASRCWVAVTPTVATRDGKLPTTQLRRHIDLLVGSATLCSALYVGDLCGSVFLVGQLFTFSPRRHWTTQDCNCSIYPGHITGHRMAWDMMMNWSPTAALVVAQLLRIPQAIMDMIAGAHWGVLAGIAYFSMVGNWAKVLVVLLLFAGVDA

SEQ ID NO: 1232 - protein, 192 aa, Artificial Sequence
  E1 N234A
YQVRNSSGLYHVTNDCPNSSIVYEAADAILHTPGCVPCVREGAASRCWVAVTPTVATRDGKLPTTQLRRHIDLLVGSATLCSALYVGDLCGSVFLVGQLFTFSPRRHWTTQDCNCSIYPGHITGHRMAWDMMMNWSPTAALVVAQLLRIPQAIMDMIAGAHWGVLAGIAYFSMVGNWAKVLVVLLLFAGVDA

SEQ ID NO: 1233 - protein, 192 aa, Artificial Sequence
  E1 S236A
YQVRNSSGLYHVTNDCPNSSIVYEAADAILHTPGCVPCVREGNAARCWVAVTPTVATRDGKLPTTQLRRHIDLLVGSATLCSALYVGDLCGSVFLVGQLFTFSPRRHWTTQDCNCSIYPGHITGHRMAWDMMMNWSPTAALVVAQLLRIPQAIMDMIAGAHWGVLAGIAYFSMVGNWAKVLVVLLLFAGVDA

SEQ ID NO: 1234 - protein, 192 aa, Artificial Sequence
  E1 W239A
YQVRNSSGLYHVTNDCPNSSIVYEAADAILHTPGCVPCVREGNASRCAVAVTPTVATRDGKLPTTQLRRHIDLLVGSATLCSALYVGDLCGSVFLVGQLFTFSPRRHWTTQDCNCSIYPGHITGHRMAWDMMMNWSPTAALVVAQLLRIPQAIMDMIAGAHWGVLAGIAYFSMVGNWAKVLVVLLLFAGVDA

SEQ ID NO: 1235 - protein, 192 aa, Artificial Sequence
  E1 P244A
YQVRNSSGLYHVTNDCPNSSIVYEAADAILHTPGCVPCVREGNASRCWVAVTATVATRDGKLPTTQLRRHIDLLVGSATLCSALYVGDLCGSVFLVGQLFTFSPRRHWTTQDCNCSIYPGHITGHRMAWDMMMNWSPTAALVVAQLLRIPQAIMDMIAGAHWGVLAGIAYFSMVGNWAKVLVVLLLFAGVDA

SEQ ID NO: 1236 - protein, 192 aa, Artificial Sequence
  E1 V246A
YQVRNSSGLYHVTNDCPNSSIVYEAADAILHTPGCVPCVREGNASRCWVAVTPTAATRDGKLPTTQLRRHIDLLVGSATLCSALYVGDLCGSVFLVGQLFTFSPRRHWTTQDCNCSIYPGHITGHRMAWDMMMNWSPTAALVVAQLLRIPQAIMDMIAGAHWGVLAGIAYFSMVGNWAKVLVVLLLFAGVDA

SEQ ID NO: 1237 - protein, 192 aa, Artificial Sequence
  E1 T255A
YQVRNSSGLYHVTNDCPNSSIVYEAADAILHTPGCVPCVREGNASRCWVAVTPTVATRDGKLPATQLRRHIDLLVGSATLCSALYVGDLCGSVFLVGQLFTFSPRRHWTTQDCNCSIYPGHITGHRMAWDMMMNWSPTAALVVAQLLRIPQAIMDMIAGAHWGVLAGIAYFSMVGNWAKVLVVLLLFAGVDA

SEQ ID NO: 1238 - protein, 192 aa, Artificial Sequence
  E1 L258A
YQVRNSSGLYHVTNDCPNSSIVYEAADAILHTPGCVPCVREGNASRCWVAVTPTVATRDGKLPTTQARRHIDLLVGSATLCSALYVGDLCGSVFLVGQLFTFSPRRHWTTQDCNCSIYPGHITGHRMAWDMMMNWSPTAALVVAQLLRIPQAIMDMIAGAHWGVLAGIAYFSMVGNWAKVLVVLLLFAGVDA

SEQ ID NO: 1239 - protein, 192 aa, Artificial Sequence
  E1 R259A
YQVRNSSGLYHVTNDCPNSSIVYEAADAILHTPGCVPCVREGNASRCWVAVTPTVATRDGKLPTTQLARHIDLLVGSATLCSALYVGDLCGSVFLVGQLFTFSPRRHWTTQDCNCSIYPGHITGHRMAWDMMMNWSPTAALVVAQLLRIPQAIMDMIAGAHWGVLAGIAYFSMVGNWAKVLVVLLLFAGVDA

SEQ ID NO: 1240 - protein, 192 aa, Artificial Sequence
  E1 H261A
YQVRNSSGLYHVTNDCPNSSIVYEAADAILHTPGCVPCVREGNASRCWVAVTPTVATRDGKLPTTQLRRAIDLLVGSATLCSALYVGDLCGSVFLVGQLFTFSPRRHWTTQDCNCSIYPGHITGHRMAWDMMMNWSPTAALVVAQLLRIPQAIMDMIAGAHWGVLAGIAYFSMVGNWAKVLVVLLLFAGVDA

SEQ ID NO: 1241 - protein, 192 aa, Artificial Sequence
  E1 D263A
YQVRNSSGLYHVTNDCPNSSIVYEAADAILHTPGCVPCVREGNASRCWVAVTPTVATRDGKLPTTQLRRHIALLVGSATLCSALYVGDLCGSVFLVGQLFTFSPRRHWTTQDCNCSIYPGHITGHRMAWDMMMNWSPTAALVVAQLLRIPQAIMDMIAGAHWGVLAGIAYFSMVGNWAKVLVVLLLFAGVDA

SEQ ID NO: 1242 - protein, 192 aa, Artificial Sequence
  E1 V266A
YQVRNSSGLYHVTNDCPNSSIVYEAADAILHTPGCVPCVREGNASRCWVAVTPTVATRDGKLPTTQLRRHIDLLAGSATLCSALYVGDLCGSVFLVGQLFTFSPRRHWTTQDCNCSIYPGHITGHRMAWDMMMNWSPTAALVVAQLLRIPQAIMDMIAGAHWGVLAGIAYFSMVGNWAKVLVVLLLFAGVDA

SEQ ID NO: 1243 - protein, 192 aa, Artificial Sequence
  E1 A269G
YQVRNSSGLYHVTNDCPNSSIVYEAADAILHTPGCVPCVREGNASRCWVAVTPTVATRDGKLPTTQLRRHIDLLVGSGTLCSALYVGDLCGSVFLVGQLFTFSPRRHWTTQDCNCSIYPGHITGHRMAWDMMMNWSPTAALVVAQLLRIPQAIMDMIAGAHWGVLAGIAYFSMVGNWAKVLVVLLLFAGVDA

SEQ ID NO: 1244 - protein, 192 aa, Artificial Sequence
  E1 S273A
YQVRNSSGLYHVTNDCPNSSIVYEAADAILHTPGCVPCVREGNASRCWVAVTPTVATRDGKLPTTQLRRHIDLLVGSATLCAALYVGDLCGSVFLVGQLFTFSPRRHWTTQDCNCSIYPGHITGHRMAWDMMMNWSPTAALVVAQLLRIPQAIMDMIAGAHWGVLAGIAYFSMVGNWAKVLVVLLLFAGVDA

SEQ ID NO: 1245 - protein, 192 aa, Artificial Sequence
  E1 A274G
YQVRNSSGLYHVTNDCPNSSIVYEAADAILHTPGCVPCVREGNASRCWVAVTPTVATRDGKLPTTQLRRHIDLLVGSATLCSGLYVGDLCGSVFLVGQLFTFSPRRHWTTQDCNCSIYPGHITGHRMAWDMMMNWSPTAALVVAQLLRIPQAIMDMIAGAHWGVLAGIAYFSMVGNWAKVLVVLLLFAGVDA

SEQ ID NO: 1246 - protein, 192 aa, Artificial Sequence
  E1 Y276A
YQVRNSSGLYHVTNDCPNSSIVYEAADAILHTPGCVPCVREGNASRCWVAVTPTVATRDGKLPTTQLRRHIDLLVGSATLCSALAVGDLCGSVFLVGQLFTFSPRRHWTTQDCNCSIYPGHITGHRMAWDMMMNWSPTAALVVAQLLRIPQAIMDMIAGAHWGVLAGIAYFSMVGNWAKVLVVLLLFAGVDA

SEQ ID NO: 1247 - protein, 192 aa, Artificial Sequence
  E1 G278A
YQVRNSSGLYHVTNDCPNSSIVYEAADAILHTPGCVPCVREGNASRCWVAVTPTVATRDGKLPTTQLRRHIDLLVGSATLCSALYVADLCGSVFLVGQLFTFSPRRHWTTQDCNCSIYPGHITGHRMAWDMMMNWSPTAALVVAQLLRIPQAIMDMIAGAHWGVLAGIAYFSMVGNWAKVLVVLLLFAGVDA

SEQ ID NO: 1248 - protein, 192 aa, Artificial Sequence
  E1 D279A
YQVRNSSGLYHVTNDCPNSSIVYEAADAILHTPGCVPCVREGNASRCWVAVTPTVATRDGKLPTTQLRRHIDLLVGSATLCSALYVGALCGSVFLVGQLFTFSPRRHWTTQDCNCSIYPGHITGHRMAWDMMMNWSPTAALVVAQLLRIPQAIMDMIAGAHWGVLAGIAYFSMVGNWAKVLVVLLLFAGVDA

SEQ ID NO: 1249 - protein, 192 aa, Artificial Sequence
  E1 G282A
YQVRNSSGLYHVTNDCPNSSIVYEAADAILHTPGCVPCVREGNASRCWVAVTPTVATRDGKLPTTQLRRHIDLLVGSATLCSALYVGDLCASVFLVGQLFTFSPRRHWTTQDCNCSIYPGHITGHRMAWDMMMNWSPTAALVVAQLLRIPQAIMDMIAGAHWGVLAGIAYFSMVGNWAKVLVVLLLFAGVDA

SEQ ID NO: 1250 - protein, 192 aa, Artificial Sequence
  E1 Q289A
YQVRNSSGLYHVTNDCPNSSIVYEAADAILHTPGCVPCVREGNASRCWVAVTPTVATRDGKLPTTQLRRHIDLLVGSATLCSALYVGDLCGSVFLVGALFTFSPRRHWTTQDCNCSIYPGHITGHRMAWDMMMNWSPTAALVVAQLLRIPQAIMDMIAGAHWGVLAGIAYFSMVGNWAKVLVVLLLFAGVDA

SEQ ID NO: 1251 - protein, 192 aa, Artificial Sequence
  E1 F291A
YQVRNSSGLYHVTNDCPNSSIVYEAADAILHTPGCVPCVREGNASRCWVAVTPTVATRDGKLPTTQLRRHIDLLVGSATLCSALYVGDLCGSVFLVGQLATFSPRRHWTTQDCNCSIYPGHITGHRMAWDMMMNWSPTAALVVAQLLRIPQAIMDMIAGAHWGVLAGIAYFSMVGNWAKVLVVLLLFAGVDA

SEQ ID NO: 1252 - protein, 192 aa, Artificial Sequence
  E1 T292A
YQVRNSSGLYHVTNDCPNSSIVYEAADAILHTPGCVPCVREGNASRCWVAVTPTVATRDGKLPTTQLRRHIDLLVGSATLCSALYVGDLCGSVFLVGQLFAFSPRRHWTTQDCNCSIYPGHITGHRMAWDMMMNWSPTAALVVAQLLRIPQAIMDMIAGAHWGVLAGIAYFSMVGNWAKVLVVLLLFAGVDA

SEQ ID NO: 1253 - protein, 192 aa, Artificial Sequence
  E1 F293A
YQVRNSSGLYHVTNDCPNSSIVYEAADAILHTPGCVPCVREGNASRCWVAVTPTVATRDGKLPTTQLRRHIDLLVGSATLCSALYVGDLCGSVFLVGQLFTASPRRHWTTQDCNCSIYPGHITGHRMAWDMMMNWSPTAALVVAQLLRIPQAIMDMIAGAHWGVLAGIAYFSMVGNWAKVLVVLLLFAGVDA

SEQ ID NO: 1254 - protein, 192 aa, Artificial Sequence
  E1 S294A
YQVRNSSGLYHVTNDCPNSSIVYEAADAILHTPGCVPCVREGNASRCWVAVTPTVATRDGKLPTTQLRRHIDLLVGSATLCSALYVGDLCGSVFLVGQLFTFAPRRHWTTQDCNCSIYPGHITGHRMAWDMMMNWSPTAALVVAQLLRIPQAIMDMIAGAHWGVLAGIAYFSMVGNWAKVLVVLLLFAGVDA

SEQ ID NO: 1255 - protein, 192 aa, Artificial Sequence
  E1 P295A
YQVRNSSGLYHVTNDCPNSSIVYEAADAILHTPGCVPCVREGNASRCWVAVTPTVATRDGKLPTTQLRRHIDLLVGSATLCSALYVGDLCGSVFLVGQLFTFSARRHWTTQDCNCSIYPGHITGHRMAWDMMMNWSPTAALVVAQLLRIPQAIMDMIAGAHWGVLAGIAYFSMVGNWAKVLVVLLLFAGVDA

SEQ ID NO: 1256 - protein, 192 aa, Artificial Sequence
  E1 R296A
YQVRNSSGLYHVTNDCPNSSIVYEAADAILHTPGCVPCVREGNASRCWVAVTPTVATRDGKLPTTQLRRHIDLLVGSATLCSALYVGDLCGSVFLVGQLFTFSPARHWTTQDCNCSIYPGHITGHRMAWDMMMNWSPTAALVVAQLLRIPQAIMDMIAGAHWGVLAGIAYFSMVGNWAKVLVVLLLFAGVDA

SEQ ID NO: 1257 - protein, 192 aa, Artificial Sequence
  E1 H298A
YQVRNSSGLYHVTNDCPNSSIVYEAADAILHTPGCVPCVREGNASRCWVAVTPTVATRDGKLPTTQLRRHIDLLVGSATLCSALYVGDLCGSVFLVGQLFTFSPRRAWTTQDCNCSIYPGHITGHRMAWDMMMNWSPTAALVVAQLLRIPQAIMDMIAGAHWGVLAGIAYFSMVGNWAKVLVVLLLFAGVDA

SEQ ID NO: 1258 - protein, 192 aa, Artificial Sequence
  E1 Q302A
YQVRNSSGLYHVTNDCPNSSIVYEAADAILHTPGCVPCVREGNASRCWVAVTPTVATRDGKLPTTQLRRHIDLLVGSATLCSALYVGDLCGSVFLVGQLFTFSPRRHWTTADCNCSIYPGHITGHRMAWDMMMNWSPTAALVVAQLLRIPQAIMDMIAGAHWGVLAGIAYFSMVGNWAKVLVVLLLFAGVDA

SEQ ID NO: 1259 - protein, 192 aa, Artificial Sequence
  E1 N305A
YQVRNSSGLYHVTNDCPNSSIVYEAADAILHTPGCVPCVREGNASRCWVAVTPTVATRDGKLPTTQLRRHIDLLVGSATLCSALYVGDLCGSVFLVGQLFTFSPRRHWTTQDCACSIYPGHITGHRMAWDMMMNWSPTAALVVAQLLRIPQAIMDMIAGAHWGVLAGIAYFSMVGNWAKVLVVLLLFAGVDA

SEQ ID NO: 1260 - protein, 192 aa, Artificial Sequence
  E1 S307A
YQVRNSSGLYHVTNDCPNSSIVYEAADAILHTPGCVPCVREGNASRCWVAVTPTVATRDGKLPTTQLRRHIDLLVGSATLCSALYVGDLCGSVFLVGQLFTFSPRRHWTTQDCNCAIYPGHITGHRMAWDMMMNWSPTAALVVAQLLRIPQAIMDMIAGAHWGVLAGIAYFSMVGNWAKVLVVLLLFAGVDA

SEQ ID NO: 1261 - protein, 192 aa, Artificial Sequence
  E1 Y309A
YQVRNSSGLYHVTNDCPNSSIVYEAADAILHTPGCVPCVREGNASRCWVAVTPTVATRDGKLPTTQLRRHIDLLVGSATLCSALYVGDLCGSVFLVGQLFTFSPRRHWTTQDCNCSIAPGHITGHRMAWDMMMNWSPTAALVVAQLLRIPQAIMDMIAGAHWGVLAGIAYFSMVGNWAKVLVVLLLFAGVDA

SEQ ID NO: 1262 - protein, 192 aa, Artificial Sequence
  E1 G311A
YQVRNSSGLYHVTNDCPNSSIVYEAADAILHTPGCVPCVREGNASRCWVAVTPTVATRDGKLPTTQLRRHIDLLVGSATLCSALYVGDLCGSVFLVGQLFTFSPRRHWTTQDCNCSIYPAHITGHRMAWDMMMNWSPTAALVVAQLLRIPQAIMDMIAGAHWGVLAGIAYFSMVGNWAKVLVVLLLFAGVDA

SEQ ID NO: 1263 - protein, 192 aa, Artificial Sequence
  E1 T314A
YQVRNSSGLYHVTNDCPNSSIVYEAADAILHTPGCVPCVREGNASRCWVAVTPTVATRDGKLPTTQLRRHIDLLVGSATLCSALYVGDLCGSVFLVGQLFTFSPRRHWTTQDCNCSIYPGHIAGHRMAWDMMMNWSPTAALVVAQLLRIPQAIMDMIAGAHWGVLAGIAYFSMVGNWAKVLVVLLLFAGVDA

SEQ ID NO: 1264 - protein, 192 aa, Artificial Sequence
  E1 G315A
YQVRNSSGLYHVTNDCPNSSIVYEAADAILHTPGCVPCVREGNASRCWVAVTPTVATRDGKLPTTQLRRHIDLLVGSATLCSALYVGDLCGSVFLVGQLFTFSPRRHWTTQDCNCSIYPGHITAHRMAWDMMMNWSPTAALVVAQLLRIPQAIMDMIAGAHWGVLAGIAYFSMVGNWAKVLVVLLLFAGVDA

SEQ ID NO: 1265 - protein, 192 aa, Artificial Sequence
  E1 H316A
YQVRNSSGLYHVTNDCPNSSIVYEAADAILHTPGCVPCVREGNASRCWVAVTPTVATRDGKLPTTQLRRHIDLLVGSATLCSALYVGDLCGSVFLVGQLFTFSPRRHWTTQDCNCSIYPGHITGARMAWDMMMNWSPTAALVVAQLLRIPQAIMDMIAGAHWGVLAGIAYFSMVGNWAKVLVVLLLFAGVDA

SEQ ID NO: 1266 - protein, 192 aa, Artificial Sequence
  E1 R317A
YQVRNSSGLYHVTNDCPNSSIVYEAADAILHTPGCVPCVREGNASRCWVAVTPTVATRDGKLPTTQLRRHIDLLVGSATLCSALYVGDLCGSVFLVGQLFTFSPRRHWTTQDCNCSIYPGHITGHAMAWDMMMNWSPTAALVVAQLLRIPQAIMDMIAGAHWGVLAGIAYFSMVGNWAKVLVVLLLFAGVDA

SEQ ID NO: 1267 - protein, 192 aa, Artificial Sequence
  E1 M318A
YQVRNSSGLYHVTNDCPNSSIVYEAADAILHTPGCVPCVREGNASRCWVAVTPTVATRDGKLPTTQLRRHIDLLVGSATLCSALYVGDLCGSVFLVGQLFTFSPRRHWTTQDCNCSIYPGHITGHRAAWDMMMNWSPTAALVVAQLLRIPQAIMDMIAGAHWGVLAGIAYFSMVGNWAKVLVVLLLFAGVDA

SEQ ID NO: 1268 - protein, 192 aa, Artificial Sequence
  E1 A319G
YQVRNSSGLYHVTNDCPNSSIVYEAADAILHTPGCVPCVREGNASRCWVAVTPTVATRDGKLPTTQLRRHIDLLVGSATLCSALYVGDLCGSVFLVGQLFTFSPRRHWTTQDCNCSIYPGHITGHRMGWDMMMNWSPTAALVVAQLLRIPQAIMDMIAGAHWGVLAGIAYFSMVGNWAKVLVVLLLFAGVDA

SEQ ID NO: 1269 - protein, 192 aa, Artificial Sequence
  E1 W320A
YQVRNSSGLYHVTNDCPNSSIVYEAADAILHTPGCVPCVREGNASRCWVAVTPTVATRDGKLPTTQLRRHIDLLVGSATLCSALYVGDLCGSVFLVGQLFTFSPRRHWTTQDCNCSIYPGHITGHRMAADMMMNWSPTAALVVAQLLRIPQAIMDMIAGAHWGVLAGIAYFSMVGNWAKVLVVLLLFAGVDA

SEQ ID NO: 1270 - protein, 192 aa, Artificial Sequence
  E1 D321A
YQVRNSSGLYHVTNDCPNSSIVYEAADAILHTPGCVPCVREGNASRCWVAVTPTVATRDGKLPTTQLRRHIDLLVGSATLCSALYVGDLCGSVFLVGQLFTFSPRRHWTTQDCNCSIYPGHITGHRMAWAMMMNWSPTAALVVAQLLRIPQAIMDMIAGAHWGVLAGIAYFSMVGNWAKVLVVLLLFAGVDA

SEQ ID NO: 1271 - protein, 192 aa, Artificial Sequence
  E1 M322A
YQVRNSSGLYHVTNDCPNSSIVYEAADAILHTPGCVPCVREGNASRCWVAVTPTVATRDGKLPTTQLRRHIDLLVGSATLCSALYVGDLCGSVFLVGQLFTFSPRRHWTTQDCNCSIYPGHITGHRMAWDAMMNWSPTAALVVAQLLRIPQAIMDMIAGAHWGVLAGIAYFSMVGNWAKVLVVLLLFAGVDA

SEQ ID NO: 1272 - protein, 192 aa, Artificial Sequence
  E1 M323A
YQVRNSSGLYHVTNDCPNSSIVYEAADAILHTPGCVPCVREGNASRCWVAVTPTVATRDGKLPTTQLRRHIDLLVGSATLCSALYVGDLCGSVFLVGQLFTFSPRRHWTTQDCNCSIYPGHITGHRMAWDMAMNWSPTAALVVAQLLRIPQAIMDMIAGAHWGVLAGIAYFSMVGNWAKVLVVLLLFAGVDA

SEQ ID NO: 1273 - protein, 192 aa, Artificial Sequence
  E1 M324A
YQVRNSSGLYHVTNDCPNSSIVYEAADAILHTPGCVPCVREGNASRCWVAVTPTVATRDGKLPTTQLRRHIDLLVGSATLCSALYVGDLCGSVFLVGQLFTFSPRRHWTTQDCNCSIYPGHITGHRMAWDMMANWSPTAALVVAQLLRIPQAIMDMIAGAHWGVLAGIAYFSMVGNWAKVLVVLLLFAGVDA

SEQ ID NO: 1274 - protein, 192 aa, Artificial Sequence
  E1 N325A
YQVRNSSGLYHVTNDCPNSSIVYEAADAILHTPGCVPCVREGNASRCWVAVTPTVATRDGKLPTTQLRRHIDLLVGSATLCSALYVGDLCGSVFLVGQLFTFSPRRHWTTQDCNCSIYPGHITGHRMAWDMMMAWSPTAALVVAQLLRIPQAIMDMIAGAHWGVLAGIAYFSMVGNWAKVLVVLLLFAGVDA

SEQ ID NO: 1275 - protein, 192 aa, Artificial Sequence
  E1 W326A
YQVRNSSGLYHVTNDCPNSSIVYEAADAILHTPGCVPCVREGNASRCWVAVTPTVATRDGKLPTTQLRRHIDLLVGSATLCSALYVGDLCGSVFLVGQLFTFSPRRHWTTQDCNCSIYPGHITGHRMAWDMMMNASPTAALVVAQLLRIPQAIMDMIAGAHWGVLAGIAYFSMVGNWAKVLVVLLLFAGVDA

SEQ ID NO: 1276 - protein, 192 aa, Artificial Sequence
  E1 S327A
YQVRNSSGLYHVTNDCPNSSIVYEAADAILHTPGCVPCVREGNASRCWVAVTPTVATRDGKLPTTQLRRHIDLLVGSATLCSALYVGDLCGSVFLVGQLFTFSPRRHWTTQDCNCSIYPGHITGHRMAWDMMMNWAPTAALVVAQLLRIPQAIMDMIAGAHWGVLAGIAYFSMVGNWAKVLVVLLLFAGVDA

SEQ ID NO: 1277 - protein, 192 aa, Artificial Sequence
  E1 P328A
YQVRNSSGLYHVTNDCPNSSIVYEAADAILHTPGCVPCVREGNASRCWVAVTPTVATRDGKLPTTQLRRHIDLLVGSATLCSALYVGDLCGSVFLVGQLFTFSPRRHWTTQDCNCSIYPGHITGHRMAWDMMMNWSATAALVVAQLLRIPQAIMDMIAGAHWGVLAGIAYFSMVGNWAKVLVVLLLFAGVDA

SEQ ID NO: 1278 - protein, 192 aa, Artificial Sequence
  E1 T329A
YQVRNSSGLYHVTNDCPNSSIVYEAADAILHTPGCVPCVREGNASRCWVAVTPTVATRDGKLPTTQLRRHIDLLVGSATLCSALYVGDLCGSVFLVGQLFTFSPRRHWTTQDCNCSIYPGHITGHRMAWDMMMNWSPAAALVVAQLLRIPQAIMDMIAGAHWGVLAGIAYFSMVGNWAKVLVVLLLFAGVDA

SEQ ID NO: 1279 - protein, 192 aa, Artificial Sequence
  E1 R339A
YQVRNSSGLYHVTNDCPNSSIVYEAADAILHTPGCVPCVREGNASRCWVAVTPTVATRDGKLPTTQLRRHIDLLVGSATLCSALYVGDLCGSVFLVGQLFTFSPRRHWTTQDCNCSIYPGHITGHRMAWDMMMNWSPTAALVVAQLLAIPQAIMDMIAGAHWGVLAGIAYFSMVGNWAKVLVVLLLFAGVDA

SEQ ID NO: 1280 - protein, 192 aa, Artificial Sequence
  E1 P341A
YQVRNSSGLYHVTNDCPNSSIVYEAADAILHTPGCVPCVREGNASRCWVAVTPTVATRDGKLPTTQLRRHIDLLVGSATLCSALYVGDLCGSVFLVGQLFTFSPRRHWTTQDCNCSIYPGHITGHRMAWDMMMNWSPTAALVVAQLLRIAQAIMDMIAGAHWGVLAGIAYFSMVGNWAKVLVVLLLFAGVDA

SEQ ID NO: 1281 - protein, 192 aa, Artificial Sequence
  E1 D346A
YQVRNSSGLYHVTNDCPNSSIVYEAADAILHTPGCVPCVREGNASRCWVAVTPTVATRDGKLPTTQLRRHIDLLVGSATLCSALYVGDLCGSVFLVGQLFTFSPRRHWTTQDCNCSIYPGHITGHRMAWDMMMNWSPTAALVVAQLLRIPQAIMAMIAGAHWGVLAGIAYFSMVGNWAKVLVVLLLFAGVDA

SEQ ID NO: 1282 - protein, 192 aa, Artificial Sequence
  E1 G350A
YQVRNSSGLYHVTNDCPNSSIVYEAADAILHTPGCVPCVREGNASRCWVAVTPTVATRDGKLPTTQLRRHIDLLVGSATLCSALYVGDLCGSVFLVGQLFTFSPRRHWTTQDCNCSIYPGHITGHRMAWDMMMNWSPTAALVVAQLLRIPQAIMDMIAAAHWGVLAGIAYFSMVGNWAKVLVVLLLFAGVDA

SEQ ID NO: 1283 - protein, 192 aa, Artificial Sequence
  E1 H352A
YQVRNSSGLYHVTNDCPNSSIVYEAADAILHTPGCVPCVREGNASRCWVAVTPTVATRDGKLPTTQLRRHIDLLVGSATLCSALYVGDLCGSVFLVGQLFTFSPRRHWTTQDCNCSIYPGHITGHRMAWDMMMNWSPTAALVVAQLLRIPQAIMDMIAGAAWGVLAGIAYFSMVGNWAKVLVVLLLFAGVDA

SEQ ID NO: 1284 - protein, 192 aa, Artificial Sequence
  E1 W353A
YQVRNSSGLYHVTNDCPNSSIVYEAADAILHTPGCVPCVREGNASRCWVAVTPTVATRDGKLPTTQLRRHIDLLVGSATLCSALYVGDLCGSVFLVGQLFTFSPRRHWTTQDCNCSIYPGHITGHRMAWDMMMNWSPTAALVVAQLLRIPQAIMDMIAGAHAGVLAGIAYFSMVGNWAKVLVVLLLFAGVDA

SEQ ID NO: 1285 - protein, 192 aa, Artificial Sequence
  E1 G354A
YQVRNSSGLYHVTNDCPNSSIVYEAADAILHTPGCVPCVREGNASRCWVAVTPTVATRDGKLPTTQLRRHIDLLVGSATLCSALYVGDLCGSVFLVGQLFTFSPRRHWTTQDCNCSIYPGHITGHRMAWDMMMNWSPTAALVVAQLLRIPQAIMDMIAGAHWAVLAGIAYFSMVGNWAKVLVVLLLFAGVDA

SEQ ID NO: 1286 - protein, 363 aa, Artificial Sequence
  E2 T425A
ETHVTGGSAGRTTAGLVGLLTPGAKQNIQLINTNGSWHINSAALNCNESLNTGWLAGLFYQHKFNSSGCPERLASCRRLTDFAQGWGPISYANGSGLDERPYCWHYPPRPCGIVPAKSVCGPVYCFTPSPVVVGTTDRSGAPTYSWGANDTDVFVLNNTRPPLGNWFGCTWMNSTGFTKVCGAPPCVIGGVGNNTLLCPTDCFRKHPEATYSRCGSGPWITPRCMVDYPYRLWHYPCTINYTIFKVRMYVGGVEHRLEAACNWTRGERCDLEDRDRSELSPLLLSTTQWQVLPCSFTTLPALSTGLIHLHQNIVDVQYLYGVGSSIASWAIKWEYVVLLFLLLADARVCSCLWMMLLISQAEA

SEQ ID NO: 1287 - protein, 363 aa, Artificial Sequence
  E2 L427A
ETHVTGGSAGRTTAGLVGLLTPGAKQNIQLINTNGSWHINSTAANCNESLNTGWLAGLFYQHKFNSSGCPERLASCRRLTDFAQGWGPISYANGSGLDERPYCWHYPPRPCGIVPAKSVCGPVYCFTPSPVVVGTTDRSGAPTYSWGANDTDVFVLNNTRPPLGNWFGCTWMNSTGFTKVCGAPPCVIGGVGNNTLLCPTDCFRKHPEATYSRCGSGPWITPRCMVDYPYRLWHYPCTINYTIFKVRMYVGGVEHRLEAACNWTRGERCDLEDRDRSELSPLLLSTTQWQVLPCSFTTLPALSTGLIHLHQNIVDVQYLYGVGSSIASWAIKWEYVVLLFLLLADARVCSCLWMMLLISQAEA

SEQ ID NO: 1288 - protein, 363 aa, Artificial Sequence
  E2 N428A
ETHVTGGSAGRTTAGLVGLLTPGAKQNIQLINTNGSWHINSTALACNESLNTGWLAGLFYQHKFNSSGCPERLASCRRLTDFAQGWGPISYANGSGLDERPYCWHYPPRPCGIVPAKSVCGPVYCFTPSPVVVGTTDRSGAPTYSWGANDTDVFVLNNTRPPLGNWFGCTWMNSTGFTKVCGAPPCVIGGVGNNTLLCPTDCFRKHPEATYSRCGSGPWITPRCMVDYPYRLWHYPCTINYTIFKVRMYVGGVEHRLEAACNWTRGERCDLEDRDRSELSPLLLSTTQWQVLPCSFTTLPALSTGLIHLHQNIVDVQYLYGVGSSIASWAIKWEYVVLLFLLLADARVCSCLWMMLLISQAEA

SEQ ID NO: 1289 - protein, 363 aa, Artificial Sequence
  E2 T435A
ETHVTGGSAGRTTAGLVGLLTPGAKQNIQLINTNGSWHINSTALNCNESLNAGWLAGLFYQHKFNSSGCPERLASCRRLTDFAQGWGPISYANGSGLDERPYCWHYPPRPCGIVPAKSVCGPVYCFTPSPVVVGTTDRSGAPTYSWGANDTDVFVLNNTRPPLGNWFGCTWMNSTGFTKVCGAPPCVIGGVGNNTLLCPTDCFRKHPEATYSRCGSGPWITPRCMVDYPYRLWHYPCTINYTIFKVRMYVGGVEHRLEAACNWTRGERCDLEDRDRSELSPLLLSTTQWQVLPCSFTTLPALSTGLIHLHQNIVDVQYLYGVGSSIASWAIKWEYVVLLFLLLADARVCSCLWMMLLISQAEA

SEQ ID NO: 1290 - protein, 363 aa, Artificial Sequence
  E2 G436A
ETHVTGGSAGRTTAGLVGLLTPGAKQNIQLINTNGSWHINSTALNCNESLNTAWLAGLFYQHKFNSSGCPERLASCRRLTDFAQGWGPISYANGSGLDERPYCWHYPPRPCGIVPAKSVCGPVYCFTPSPVVVGTTDRSGAPTYSWGANDTDVFVLNNTRPPLGNWFGCTWMNSTGFTKVCGAPPCVIGGVGNNTLLCPTDCFRKHPEATYSRCGSGPWITPRCMVDYPYRLWHYPCTINYTIFKVRMYVGGVEHRLEAACNWTRGERCDLEDRDRSELSPLLLSTTQWQVLPCSFTTLPALSTGLIHLHQNIVDVQYLYGVGSSIASWAIKWEYVVLLFLLLADARVCSCLWMMLLISQAEA

SEQ ID NO: 1291 - protein, 363 aa, Artificial Sequence
  E2 A439G
ETHVTGGSAGRTTAGLVGLLTPGAKQNIQLINTNGSWHINSTALNCNESLNTGWLGGLFYQHKFNSSGCPERLASCRRLTDFAQGWGPISYANGSGLDERPYCWHYPPRPCGIVPAKSVCGPVYCFTPSPVVVGTTDRSGAPTYSWGANDTDVFVLNNTRPPLGNWFGCTWMNSTGFTKVCGAPPCVIGGVGNNTLLCPTDCFRKHPEATYSRCGSGPWITPRCMVDYPYRLWHYPCTINYTIFKVRMYVGGVEHRLEAACNWTRGERCDLEDRDRSELSPLLLSTTQWQVLPCSFTTLPALSTGLIHLHQNIVDVQYLYGVGSSIASWAIKWEYVVLLFLLLADARVCSCLWMMLLISQAEA

SEQ ID NO: 1292 - protein, 363 aa, Artificial Sequence
  E2 L441G
ETHVTGGSAGRTTAGLVGLLTPGAKQNIQLINTNGSWHINSTALNCNESLNTGWLAGAFYQHKFNSSGCPERLASCRRLTDFAQGWGPISYANGSGLDERPYCWHYPPRPCGIVPAKSVCGPVYCFTPSPVVVGTTDRSGAPTYSWGANDTDVFVLNNTRPPLGNWFGCTWMNSTGFTKVCGAPPCVIGGVGNNTLLCPTDCFRKHPEATYSRCGSGPWITPRCMVDYPYRLWHYPCTINYTIFKVRMYVGGVEHRLEAACNWTRGERCDLEDRDRSELSPLLLSTTQWQVLPCSFTTLPALSTGLIHLHQNIVDVQYLYGVGSSIASWAIKWEYVVLLFLLLADARVCSCLWMMLLISQAEA

SEQ ID NO: 1293 - protein, 363 aa, Artificial Sequence
  E2 F442G
ETHVTGGSAGRTTAGLVGLLTPGAKQNIQLINTNGSWHINSTALNCNESLNTGWLAGLAYQHKFNSSGCPERLASCRRLTDFAQGWGPISYANGSGLDERPYCWHYPPRPCGIVPAKSVCGPVYCFTPSPVVVGTTDRSGAPTYSWGANDTDVFVLNNTRPPLGNWFGCTWMNSTGFTKVCGAPPCVIGGVGNNTLLCPTDCFRKHPEATYSRCGSGPWITPRCMVDYPYRLWHYPCTINYTIFKVRMYVGGVEHRLEAACNWTRGERCDLEDRDRSELSPLLLSTTQWQVLPCSFTTLPALSTGLIHLHQNIVDVQYLYGVGSSIASWAIKWEYVVLLFLLLADARVCSCLWMMLLISQAEA

SEQ ID NO: 1294 - protein, 363 aa, Artificial Sequence
  E2 Y443A
ETHVTGGSAGRTTAGLVGLLTPGAKQNIQLINTNGSWHINSTALNCNESLNTGWLAGLFAQHKFNSSGCPERLASCRRLTDFAQGWGPISYANGSGLDERPYCWHYPPRPCGIVPAKSVCGPVYCFTPSPVVVGTTDRSGAPTYSWGANDTDVFVLNNTRPPLGNWFGCTWMNSTGFTKVCGAPPCVIGGVGNNTLLCPTDCFRKHPEATYSRCGSGPWITPRCMVDYPYRLWHYPCTINYTIFKVRMYVGGVEHRLEAACNWTRGERCDLEDRDRSELSPLLLSTTQWQVLPCSFTTLPALSTGLIHLHQNIVDVQYLYGVGSSIASWAIKWEYVVLLFLLLADARVCSCLWMMLLISQAEA

SEQ ID NO: 1295 - protein, 363 aa, Artificial Sequence
  E2 F447A
ETHVTGGSAGRTTAGLVGLLTPGAKQNIQLINTNGSWHINSTALNCNESLNTGWLAGLFYQHKANSSGCPERLASCRRLTDFAQGWGPISYANGSGLDERPYCWHYPPRPCGIVPAKSVCGPVYCFTPSPVVVGTTDRSGAPTYSWGANDTDVFVLNNTRPPLGNWFGCTWMNSTGFTKVCGAPPCVIGGVGNNTLLCPTDCFRKHPEATYSRCGSGPWITPRCMVDYPYRLWHYPCTINYTIFKVRMYVGGVEHRLEAACNWTRGERCDLEDRDRSELSPLLLSTTQWQVLPCSFTTLPALSTGLIHLHQNIVDVQYLYGVGSSIASWAIKWEYVVLLFLLLADARVCSCLWMMLLISQAEA

SEQ ID NO: 1296 - protein, 363 aa, Artificial Sequence
  E2 N448A
ETHVTGGSAGRTTAGLVGLLTPGAKQNIQLINTNGSWHINSTALNCNESLNTGWLAGLFYQHKFASSGCPERLASCRRLTDFAQGWGPISYANGSGLDERPYCWHYPPRPCGIVPAKSVCGPVYCFTPSPVVVGTTDRSGAPTYSWGANDTDVFVLNNTRPPLGNWFGCTWMNSTGFTKVCGAPPCVIGGVGNNTLLCPTDCFRKHPEATYSRCGSGPWITPRCMVDYPYRLWHYPCTINYTIFKVRMYVGGVEHRLEAACNWTRGERCDLEDRDRSELSPLLLSTTQWQVLPCSFTTLPALSTGLIHLHQNIVDVQYLYGVGSSIASWAIKWEYVVLLFLLLADARVCSCLWMMLLISQAEA

SEQ ID NO: 1297 - protein, 363 aa, Artificial Sequence
  E2 R614A
ETHVTGGSAGRTTAGLVGLLTPGAKQNIQLINTNGSWHINSTALNCNESLNTGWLAGLFYQHKFNSSGCPERLASCRRLTDFAQGWGPISYANGSGLDERPYCWHYPPRPCGIVPAKSVCGPVYCFTPSPVVVGTTDRSGAPTYSWGANDTDVFVLNNTRPPLGNWFGCTWMNSTGFTKVCGAPPCVIGGVGNNTLLCPTDCFRKHPEATYSRCGSGPWITPRCMVDYPYALWHYPCTINYTIFKVRMYVGGVEHRLEAACNWTRGERCDLEDRDRSELSPLLLSTTQWQVLPCSFTTLPALSTGLIHLHQNIVDVQYLYGVGSSIASWAIKWEYVVLLFLLLADARVCSCLWMMLLISQAEA

SEQ ID NO: 1298 - protein, 363 aa, Artificial Sequence
  E2 H617A
ETHVTGGSAGRTTAGLVGLLTPGAKQNIQLINTNGSWHINSTALNCNESLNTGWLAGLFYQHKFNSSGCPERLASCRRLTDFAQGWGPISYANGSGLDERPYCWHYPPRPCGIVPAKSVCGPVYCFTPSPVVVGTTDRSGAPTYSWGANDTDVFVLNNTRPPLGNWFGCTWMNSTGFTKVCGAPPCVIGGVGNNTLLCPTDCFRKHPEATYSRCGSGPWITPRCMVDYPYRLWAYPCTINYTIFKVRMYVGGVEHRLEAACNWTRGERCDLEDRDRSELSPLLLSTTQWQVLPCSFTTLPALSTGLIHLHQNIVDVQYLYGVGSSIASWAIKWEYVVLLFLLLADARVCSCLWMMLLISQAEA

SEQ ID NO: 1299 - protein, 363 aa, Artificial Sequence
  E2 Y618A
ETHVTGGSAGRTTAGLVGLLTPGAKQNIQLINTNGSWHINSTALNCNESLNTGWLAGLFYQHKFNSSGCPERLASCRRLTDFAQGWGPISYANGSGLDERPYCWHYPPRPCGIVPAKSVCGPVYCFTPSPVVVGTTDRSGAPTYSWGANDTDVFVLNNTRPPLGNWFGCTWMNSTGFTKVCGAPPCVIGGVGNNTLLCPTDCFRKHPEATYSRCGSGPWITPRCMVDYPYRLWHAPCTINYTIFKVRMYVGGVEHRLEAACNWTRGERCDLEDRDRSELSPLLLSTTQWQVLPCSFTTLPALSTGLIHLHQNIVDVQYLYGVGSSIASWAIKWEYVVLLFLLLADARVCSCLWMMLLISQAEA

SEQ ID NO: 1300 - protein, 363 aa, Artificial Sequence
  E2 P619A
ETHVTGGSAGRTTAGLVGLLTPGAKQNIQLINTNGSWHINSTALNCNESLNTGWLAGLFYQHKFNSSGCPERLASCRRLTDFAQGWGPISYANGSGLDERPYCWHYPPRPCGIVPAKSVCGPVYCFTPSPVVVGTTDRSGAPTYSWGANDTDVFVLNNTRPPLGNWFGCTWMNSTGFTKVCGAPPCVIGGVGNNTLLCPTDCFRKHPEATYSRCGSGPWITPRCMVDYPYRLWHYACTINYTIFKVRMYVGGVEHRLEAACNWTRGERCDLEDRDRSELSPLLLSTTQWQVLPCSFTTLPALSTGLIHLHQNIVDVQYLYGVGSSIASWAIKWEYVVLLFLLLADARVCSCLWMMLLISQAEA

SEQ ID NO: 1301 - protein, 363 aa, Artificial Sequence
  E2 T621A
ETHVTGGSAGRTTAGLVGLLTPGAKQNIQLINTNGSWHINSTALNCNESLNTGWLAGLFYQHKFNSSGCPERLASCRRLTDFAQGWGPISYANGSGLDERPYCWHYPPRPCGIVPAKSVCGPVYCFTPSPVVVGTTDRSGAPTYSWGANDTDVFVLNNTRPPLGNWFGCTWMNSTGFTKVCGAPPCVIGGVGNNTLLCPTDCFRKHPEATYSRCGSGPWITPRCMVDYPYRLWHYPCAINYTIFKVRMYVGGVEHRLEAACNWTRGERCDLEDRDRSELSPLLLSTTQWQVLPCSFTTLPALSTGLIHLHQNIVDVQYLYGVGSSIASWAIKWEYVVLLFLLLADARVCSCLWMMLLISQAEA

SEQ ID NO: 1302 - protein, 363 aa, Artificial Sequence
  E2 N623A
ETHVTGGSAGRTTAGLVGLLTPGAKQNIQLINTNGSWHINSTALNCNESLNTGWLAGLFYQHKFNSSGCPERLASCRRLTDFAQGWGPISYANGSGLDERPYCWHYPPRPCGIVPAKSVCGPVYCFTPSPVVVGTTDRSGAPTYSWGANDTDVFVLNNTRPPLGNWFGCTWMNSTGFTKVCGAPPCVIGGVGNNTLLCPTDCFRKHPEATYSRCGSGPWITPRCMVDYPYRLWHYPCTIAYTIFKVRMYVGGVEHRLEAACNWTRGERCDLEDRDRSELSPLLLSTTQWQVLPCSFTTLPALSTGLIHLHQNIVDVQYLYGVGSSIASWAIKWEYVVLLFLLLADARVCSCLWMMLLISQAEA

SEQ ID NO: 1303 - protein, 363 aa, Artificial Sequence
  E2 Y624A
ETHVTGGSAGRTTAGLVGLLTPGAKQNIQLINTNGSWHINSTALNCNESLNTGWLAGLFYQHKFNSSGCPERLASCRRLTDFAQGWGPISYANGSGLDERPYCWHYPPRPCGIVPAKSVCGPVYCFTPSPVVVGTTDRSGAPTYSWGANDTDVFVLNNTRPPLGNWFGCTWMNSTGFTKVCGAPPCVIGGVGNNTLLCPTDCFRKHPEATYSRCGSGPWITPRCMVDYPYRLWHYPCTINATIFKVRMYVGGVEHRLEAACNWTRGERCDLEDRDRSELSPLLLSTTQWQVLPCSFTTLPALSTGLIHLHQNIVDVQYLYGVGSSIASWAIKWEYVVLLFLLLADARVCSCLWMMLLISQAEA

SEQ ID NO: 1304 - protein, 363 aa, Artificial Sequence
  E2 R630A
ETHVTGGSAGRTTAGLVGLLTPGAKQNIQLINTNGSWHINSTALNCNESLNTGWLAGLFYQHKFNSSGCPERLASCRRLTDFAQGWGPISYANGSGLDERPYCWHYPPRPCGIVPAKSVCGPVYCFTPSPVVVGTTDRSGAPTYSWGANDTDVFVLNNTRPPLGNWFGCTWMNSTGFTKVCGAPPCVIGGVGNNTLLCPTDCFRKHPEATYSRCGSGPWITPRCMVDYPYRLWHYPCTINYTIFKVAMYVGGVEHRLEAACNWTRGERCDLEDRDRSELSPLLLSTTQWQVLPCSFTTLPALSTGLIHLHQNIVDVQYLYGVGSSIASWAIKWEYVVLLFLLLADARVCSCLWMMLLISQAEA

SEQ ID NO: 1305 - protein, 363 aa, Artificial Sequence
  E2 G634A
ETHVTGGSAGRTTAGLVGLLTPGAKQNIQLINTNGSWHINSTALNCNESLNTGWLAGLFYQHKFNSSGCPERLASCRRLTDFAQGWGPISYANGSGLDERPYCWHYPPRPCGIVPAKSVCGPVYCFTPSPVVVGTTDRSGAPTYSWGANDTDVFVLNNTRPPLGNWFGCTWMNSTGFTKVCGAPPCVIGGVGNNTLLCPTDCFRKHPEATYSRCGSGPWITPRCMVDYPYRLWHYPCTINYTIFKVRMYVAGVEHRLEAACNWTRGERCDLEDRDRSELSPLLLSTTQWQVLPCSFTTLPALSTGLIHLHQNIVDVQYLYGVGSSIASWAIKWEYVVLLFLLLADARVCSCLWMMLLISQAEA

SEQ ID NO: 1306 - protein, 363 aa, Artificial Sequence
  E2 G635A
ETHVTGGSAGRTTAGLVGLLTPGAKQNIQLINTNGSWHINSTALNCNESLNTGWLAGLFYQHKFNSSGCPERLASCRRLTDFAQGWGPISYANGSGLDERPYCWHYPPRPCGIVPAKSVCGPVYCFTPSPVVVGTTDRSGAPTYSWGANDTDVFVLNNTRPPLGNWFGCTWMNSTGFTKVCGAPPCVIGGVGNNTLLCPTDCFRKHPEATYSRCGSGPWITPRCMVDYPYRLWHYPCTINYTIFKVRMYVGAVEHRLEAACNWTRGERCDLEDRDRSELSPLLLSTTQWQVLPCSFTTLPALSTGLIHLHQNIVDVQYLYGVGSSIASWAIKWEYVVLLFLLLADARVCSCLWMMLLISQAEA

SEQ ID NO: 1307 - protein, 363 aa, Artificial Sequence
  E2 E637A
ETHVTGGSAGRTTAGLVGLLTPGAKQNIQLINTNGSWHINSTALNCNESLNTGWLAGLFYQHKFNSSGCPERLASCRRLTDFAQGWGPISYANGSGLDERPYCWHYPPRPCGIVPAKSVCGPVYCFTPSPVVVGTTDRSGAPTYSWGANDTDVFVLNNTRPPLGNWFGCTWMNSTGFTKVCGAPPCVIGGVGNNTLLCPTDCFRKHPEATYSRCGSGPWITPRCMVDYPYRLWHYPCTINYTIFKVRMYVGGVAHRLEAACNWTRGERCDLEDRDRSELSPLLLSTTQWQVLPCSFTTLPALSTGLIHLHQNIVDVQYLYGVGSSIASWAIKWEYVVLLFLLLADARVCSCLWMMLLISQAEA

SEQ ID NO: 1308 - protein, 363 aa, Artificial Sequence
  E2 H638A
ETHVTGGSAGRTTAGLVGLLTPGAKQNIQLINTNGSWHINSTALNCNESLNTGWLAGLFYQHKFNSSGCPERLASCRRLTDFAQGWGPISYANGSGLDERPYCWHYPPRPCGIVPAKSVCGPVYCFTPSPVVVGTTDRSGAPTYSWGANDTDVFVLNNTRPPLGNWFGCTWMNSTGFTKVCGAPPCVIGGVGNNTLLCPTDCFRKHPEATYSRCGSGPWITPRCMVDYPYRLWHYPCTINYTIFKVRMYVGGVEARLEAACNWTRGERCDLEDRDRSELSPLLLSTTQWQVLPCSFTTLPALSTGLIHLHQNIVDVQYLYGVGSSIASWAIKWEYVVLLFLLLADARVCSCLWMMLLISQAEA

SEQ ID NO: 1309 - protein, 363 aa, Artificial Sequence
  E2 R639A
ETHVTGGSAGRTTAGLVGLLTPGAKQNIQLINTNGSWHINSTALNCNESLNTGWLAGLFYQHKFNSSGCPERLASCRRLTDFAQGWGPISYANGSGLDERPYCWHYPPRPCGIVPAKSVCGPVYCFTPSPVVVGTTDRSGAPTYSWGANDTDVFVLNNTRPPLGNWFGCTWMNSTGFTKVCGAPPCVIGGVGNNTLLCPTDCFRKHPEATYSRCGSGPWITPRCMVDYPYRLWHYPCTINYTIFKVRMYVGGVEHALEAACNWTRGERCDLEDRDRSELSPLLLSTTQWQVLPCSFTTLPALSTGLIHLHQNIVDVQYLYGVGSSIASWAIKWEYVVLLFLLLADARVCSCLWMMLLISQAEA

SEQ ID NO: 1310 - protein, 363 aa, Artificial Sequence
  E2 A642G
ETHVTGGSAGRTTAGLVGLLTPGAKQNIQLINTNGSWHINSTALNCNESLNTGWLAGLFYQHKFNSSGCPERLASCRRLTDFAQGWGPISYANGSGLDERPYCWHYPPRPCGIVPAKSVCGPVYCFTPSPVVVGTTDRSGAPTYSWGANDTDVFVLNNTRPPLGNWFGCTWMNSTGFTKVCGAPPCVIGGVGNNTLLCPTDCFRKHPEATYSRCGSGPWITPRCMVDYPYRLWHYPCTINYTIFKVRMYVGGVEHRLEGACNWTRGERCDLEDRDRSELSPLLLSTTQWQVLPCSFTTLPALSTGLIHLHQNIVDVQYLYGVGSSIASWAIKWEYVVLLFLLLADARVCSCLWMMLLISQAEA

SEQ ID NO: 1311 - protein, 363 aa, Artificial Sequence
  E2 A643G
ETHVTGGSAGRTTAGLVGLLTPGAKQNIQLINTNGSWHINSTALNCNESLNTGWLAGLFYQHKFNSSGCPERLASCRRLTDFAQGWGPISYANGSGLDERPYCWHYPPRPCGIVPAKSVCGPVYCFTPSPVVVGTTDRSGAPTYSWGANDTDVFVLNNTRPPLGNWFGCTWMNSTGFTKVCGAPPCVIGGVGNNTLLCPTDCFRKHPEATYSRCGSGPWITPRCMVDYPYRLWHYPCTINYTIFKVRMYVGGVEHRLEAGCNWTRGERCDLEDRDRSELSPLLLSTTQWQVLPCSFTTLPALSTGLIHLHQNIVDVQYLYGVGSSIASWAIKWEYVVLLFLLLADARVCSCLWMMLLISQAEA

SEQ ID NO: 1312 - protein, 363 aa, Artificial Sequence
  E2 1a.US.H77
ETHVTGGSAGRTTAGLVGLLTPGAKQNIQLINTNGSWHINSTALNCNESLNTGWLAGLFYQHKFNSSGCPERLASCRRLTDFAQGWGPISYANGSGLDERPYCWHYPPRPCGIVPAKSVCGPVYCFTPSPVVVGTTDRSGAPTYSWGANDTDVFVLNNTRPPLGNWFGCTWMNSTGFTKVCGAPPCVIGGVGNNTLLCPTDCFRKHPEATYSRCGSGPWITPRCMVDYPYRLWHYPCTINYTIFKVRMYVGGVEHRLEAACNWTRGERCDLEDRDRSELSPLLLSTTQWQVLPCSFTTLPALSTGLIHLHQNIVDVQYLYGVGSSIASWAIKWEYVVLLFLLLADARVCSCLWMMLLISQAEA

SEQ ID NO: 1313 - protein, 363 aa, Artificial Sequence
  E2 1a.JP.JC-J1
ETIVSGGQAARAMSGLVSLFTPGAKQNIQLINTNGSWHINSTALNCNESLNTGWLAGLIYQHKFNSSGCPERLASCRRLTDFDQGWGPISHANGSGPDQRPYCWHYPPKPCGIVPAKSVCGPVYCFTPSPVVVGTTDRSGAPTYNWGANDTDVFVLNNTRPPLGNWFGCTWMNSTGFTKVCGAPPCVIGGGGNNTLHCPTDCFRKHPEATYSRCGSGPWITPRCLVDYPYRLWHYPCTINYTIFKVRMYVGGVEHRLDAACNWTRGERCDLEDRDRSELSPLLLSTTQWQVLPCSFTTLPALSTGLIHLHQNIVDVQYLYGVGSSIASWAIKWEYVVLLFLLLADARVCSCLWMMLLISQAEA

SEQ ID NO: 1314 - protein, 363 aa, Artificial Sequence
  E2 1b.KK.HCV-L2
TTVTMGGTVARTTYGFTGLFRPGASQKIQLINTNGSWHINRTALNCNDSLNTGFLAALFYTHRFNASGCPERMASCQSIDKFVQGWGPITYAENGSSDQRPYCWHYAPRRCGIVPASQVCGPVYCFTPSPVVVGTTDRSGAPTYSWGENETDVLLLNNTRPPQGNWFGCTWMSSTGFTKTCGGPPCNIGGAGNNTLTCPTDCFRKHPEATYTKCGSGPWLTPRCLVDYPYRLWHYPCTVNFTTFKVRMYVGGVEHRLIAACNWTRGERCNLEDRDRSELSPLLLSTTEWQILPCSYTTLPALSTGLIHLHQNIVDVQYLYGIGSAVVSFVIKWEYVLLFFLLLADARVCACLWMILLIAQAEA

SEQ ID NO: 1315 - protein, 363 aa, Artificial Sequence
  E2 1c.IN
TTQVTGGTAGRNAYRLASLFSTGPSQNIQLINSNGSWHINRTALNCNDSLHTGWVAALFYSHKFNSSGRPERMASCRPLTAFDQGWGPITYGGKASNDQRPYCWHYAPRPCGIVPAKEVCGPVYCFTPSPVVVGTTDKYGVPTYTWGENETDVLLLNNSRPPIGNWFGCTWMNSTGFTKTCGAPACNVGGSETNTLSCPTDCFRRHPDATYAKCGSGPWLNPRCMVDYPYRLWHYPCTVNYTIFKIRMFVGGIEHRLTAACNWTRGERCDLDDRDRAELSPLLLSTTQWQVLPCSFTTLPALSTGLIHLHQNIVDVQYLYGLSSVVTSWAIRWEYVVLLFLLLADARICACLWMMLLISQVEA

SEQ ID NO: 1316 - protein, 367 aa, Artificial Sequence
  E2 2a.JP
YTHTVGGAAASTANSIAGLLSRGPRQNLQLINSNGSWHINRTALNCHDSLQTGFITALFYARHFNSSGCPERLAACRNIEAFRVGWGALQYEDNVTNPEDMRPYCWHYPPKQCGIVPARSVCGPVYCFTPSPVVVGTTDKLGVPTYTWGENETDVFLLNSTRPPQGPWFGCTWMNSTGFTKTCGAPPCRTRADFNASTDLLCPTDCFRKHPDATYNKCGSGPWLTPRCLIDYPYRLWHYPCTVNYTTFKIRMYVGGVEHRLMAACNFTRGDSCDLSQRDRGQLSPLLHSTTEWAILPCSFSDLPALSTGLLHLHQNIVDVQYMYGLSPALTKYIVRWEWVVLLFLLLADARVCACIWMLILLGQAEA

SEQ ID NO: 1317 - protein, 367 aa, Artificial Sequence
  E2 2b.JP.MD2b1-2
RHHTTGLQVGKTLARVTSLFSIGPKQNIQLINTNGSWHINRTALNCNDSLQTGFIASLFYVNNINSSGCPERMSSCRELDDFRIGWGTLEYETNVTNDEDMRPYCWHYPPKPCGIVPARTVCGPVYCFTPSPIVVGTTDKQGVPTYSWGENETDVFLLNSTRPPRGSWFGCTWMNGTGFTKTCGAPPCRIRRDYNSTLDLLCPTDCFRKHPDTTYLKCGSGPWLTPKCLVEYPYRLWHYPCTVNFTIFKVRMYVGGVEHRFSAACNFTRGDRCRLEDRDRGQQSPLLHSTTEWAVLPCSFSDLPALSTGLLHLHQNIVDVQYLYGLSPAITRYIVKWEWVVLLFLLLADARVCACLWMLIILGQAEA

SEQ ID NO: 1318 - protein, 367 aa, Artificial Sequence
  E2 2c.BEBE1
STYTTGAVVGRSTHLFTSMFSLGSQQRVQLIHTNGSWHINRTALNCNDSLETGFLAALFYTSSFNSSGCPERLAACRSIESFRIGWGSLEYEESVTNDADMRPYCWHYPPRPCGIVPARTVCGPVYCFTPSPVVVGTTDRAGAPTYNWGENETDVFLLNSTRPPKGAWFGCTWMNGTGFTKTCGAPPCRIRKDFNASEDLLCPTDCFRKHPGATYIKCGAGPWLTPRCLVDYPYRLWHYPCTVNYTIYKVRMFVGGIEHRLQAACNFTRGDRCNLEDRDRSQLSPLLHSTTEWAILPCSYTDLPALSTGLLHLHQNIVDVQYLYGLSPAITKYVVKWEWVVLLFLLLADARVCACLWMLLLLGQAEA

SEQ ID NO: 1319 - protein, 367 aa, Artificial Sequence
  E2 2i.VN.d54
STYSTGAQAGRAASGFAGLFTRGARQNIQLINTNGSWHINRTALNCNDSLQTGFIASLFYANSFNSSGCPERMAHCRSIEHFRIGWGALEYEENVINEEDMRPYCWHYPPKPCGVVPAKSVCGPVYCFTPSPVVVGTTDKRGVPTYNWGDNETDVFLLNSTRPPKGAWFGCTWMNGTGFTKTCGAPPCRIRRDFNASEDLLCPTDCFRKHPEATYSKCGAGPWLTPRCLIDYPYRLWHYPCTFNYTIFKIRMFVGGIEHRLQAACNFTRGDRCNLDDRDRSQLSPLLHSTTEWAILPCSFTDLPALSTGLIHLHQNIVDVQYLYGLTPAITKYVVKWEWVVLLFLLLADARVCACLWMLILLGQAEA

SEQ ID NO: 1320 - protein, 367 aa, Artificial Sequence
  E2 2k.MD.VAT96
QTHTISGHAARTTHGLVSLFTPGSQQNIQLVNTNGSWHINRTALNCNDSLKTGFIAALFYSHKFNSSGCPQRMSSCRSIEEFRIGWGNLEYEENVTNDDNMRPYCWHYPPRPCGIVPAQTVCGPVYCFTPSPVVVGTTDRRGVPTYTWGENDTDVFLLNSTRPPRGAWFGCTWMNSTGFTKTCGAPPCRIRPDFNSSEDLLCPTDCFRKHSEATYTRCGAGPWLTPKCLFHYPYRLWHYPCTINFTIHKIRMFIGGVEHRLEAACNFTRGDRCNLEDRDRSQLSPLLHSTTEWAILPCTFSDMPALSTGLLHLHQNIVDVQYLYGLSPAITKYIVKWEWVVLLFLLLADARVCACLWMLLLLGQAEA

SEQ ID NO: 1321 - protein, 369 aa, Artificial Sequence
  E2 3a.CH.452
TTYTTGGNAARGASGIVSLFTPGAKQNLQLVNTNGSWHINRTALNCNDSINTGFIAGLIYYHKFNSTGCPQRLSSCKPITFFRQGWGSLTDANITGPSDDKPYCWHYPPRPCDTIRASSVCGPVYCFTPSPVVVGTTDAKGAPTYNWGANETDMFLLQSLRPPSGRWFGCTWMNSTGFTKTCGAPPCNIYGGGGNLNNESDLFCPTDCFRKHPEATYSRCGAGPWLTPRCLVDYPYRLWHYPCTVNFTLFRMRTFVGGFEHRFTAACNWTRGERCNIEDRDRSEQHPLLHSTTELAILPCSFTPMPALSTGLIHLHQNIVDVQYLYGIGSGVVGWALKWEFVILVFLLLADARVCVALWLMLMISQAEA

SEQ ID NO: 1322 - protein, 370 aa, Artificial Sequence
  E2 3b.JP.HCV-Tr
TTHTTGGSAAQATAGFTSFFTRGPSQNLQLVNSNGSWHINSTALNCNDSLNTGFIAGLFYYHKFNSSGCPERMSSCKPITYFNQGWGPLTDANINGPSEDRPYCWHYPPRPCNITKPLNVCGPVYCFTPSPVVVGTTDIKGLPTYRFGVNESDVFLLTSLRPPQGRWFGCVWMNSTGFVKTCGAPPCNIYGGMKDIEANQTHLKCPTDCFRKHHDATFTRCGSGPWLTPRCLVDYPYRLWHYPCTVNFSIFKVRMFVGGHEHRFSAACNWTRGERCDLEDRDRSEQQPLLHSTTDSLILPCSFTPMRRLSTGLIHLHQNIVDVQYLYGVGSAVVGWALKWEFVVLVFLLLADARVCVALWMMLLISQAEA

SEQ ID NO: 1323 - protein, 368 aa, Artificial Sequence
  E2 3k.ID.JK049
STTITGGVAASGAFTITSLFSTGAKQPLHLVNTNGSWHINRTALNCNDSLNTGFIAGLLYYHKFNSSGCVERMSACSPLDRFAQGWGPLGPANISGPSSEKPYCWHYAPRPCDTVPAQSVCGPVYCFTPSPVVVGATDKRGAPTYTWGENESDVFLLESARPPTEPWFGCTWMNGSGYVKTCGAPPCHIYGGREGKSNNSLVCPTDCFRKHPDATYNRCGAGPWLTPRCLVDYPYRLWHYPCTVNYTIFKVRMFVGGLEHRFNAACNWTRGERCNLEDRDRSEMYPLLHSTTEQAILPCSFVPIPALSTGLIHLHQNIVDVQYLYGISSGLVGWAIKWEFVILIFLLLADARVCVVLWMMMLISQAEA

SEQ ID NO: 1324 - protein, 363 aa, Artificial Sequence
  E2 4a.EG.ED43
ETHVSGAAVGRSTAGLANLFSSGSKQNLQLINSNGSWHINRTALNCNDSLNTGFLASLFYTHKFNSSGCSERLACCKSLDSYGQGWGPLGVANISGSSDDRPYCWHYAPRPCGIVPASSVCGPVYCFTPSPVVVGTTDHVGVPTYTWGENETDVFLLNSTRPPHGAWFGCVWMNSTGFTKTCGAPPCEVNTNNGTWHCPTDCFRKHPETTYAKCGSGPWITPRCLIDYPYRLWHFPCTANFSVFNIRTFVGGIEHRMQAACNWTRGEVCGLEHRDRVELSPLLLTTTAWQILPCSFTTLPALSTGLIHLHQNIVDVQYLYGVGSAVVSWALKWEYVVLAFLLLADARVSAYLWMMFMVSQVEA

SEQ ID NO: 1325 - protein, 362 aa, Artificial Sequence
  E2 4d.24
QTHITGGKAGRDALTFAGLFTMGGQQHIQLINTNGSWHINRTALNCNDSLNTGFLASLFYYRRFNSSGCPERLASCSSLDSLPQGWGPLGIYQPNVPDTRPYCWNYTPRPCGTVSALTVCGPVYCFTPSPVVVGTTDRRGAPTYTWGENETDVFLLNTTRPPRGAWFGCTWMNSTGFTKSCGGPPCSITANGSTWGCPTDCFRKHPEATYTKCGSGPWLTPRCLVDYPYRLWHYPCTVNYTVFKVRMYIGGIEHRLDAACNWTRGEPCDLEHRDRTEISPLLLSTTQWQVLPCSFTTLPALSTGLIHLHQNIVDVQYLYGVGSAVVSWALKWEYVVLAFLLLAGARICACLWMMLLVAQVEA

SEQ ID NO: 1326 - protein, 365 aa, Artificial Sequence
  E2 4f.FR. IFBT84
VTYTTGSSAGSTIHGIANLFTPGSKQNLQLINTNGSWHINRTALNCNDSLQTGFIAGLIYRNKFNSSGCPERLSRCKRLDDLAQGWGKLGAANITGSSDDRPYCWHYAPRPCGVVPASEVCGPVYCFTPSPVAVGTTDRLGVPTYSWGANETDVFILNSTRPPRGAWFGCTWMNGTGFTKTCGAPPCQVQASVANQSWSCPTDCFRKHPETTYTKCGSGPWLTPRCLIDYPYRLWHYPCTVNFSIFKVRMFVAGVEHRLEAACNWTRGEPCGLEHRDRAELSPLLLSTTQWQVLPCSFTPLPALSTGLIHLHQNIVDVQYLYGIGSVVVSWALKWEYVVLAFLLLADARVCACLWMMLLVSQVEA

SEQ ID NO: 1327 - protein, 364 aa, Artificial Sequence
  E2 5a.ZA.SA13
NTRTVGGSAAQGARGLASLFTPGPQQNLQLINTNGSWHINRTALNCNDSLQTGFVAGLLYYHKFNSTGCPQRMASCRPLAAFDQGWGTISYAAVSGPSDDKPYCWHYPPRPCGIVPARGVCGPVYCFTPSPVVVGTTDRKGNPTYSWGENETDIFLLNNTRPPTGNWFGCTWMNSTGFVKTCGAPPCNLGPTGNNSLKCPTDCFRKHPDATYTKCGSGPWLTPRCLVHYPYRLWHYPCTLNYTIFKVRMYIGGLEHRLEVACNWTRGERCDLEDRDRAELSPLLHTTTQWAILPCSFTPTPALSTGLIHLHQNIVDTQYLYGLSSSIVSWAVKWEYIVLAFLLLADARICTCLWIMLLVCQAEA

SEQ ID NO: 1328 - protein, 368 aa, Artificial Sequence
  E2 6a.HK.6a33
TTTVGHGVARTTAGITGLFSPGASQNLQLIKNGSSWHINRTALNCNDSLQTGFLASLFYVRKFNSSGCPERMAVCKSLADFRQGWGQITYKVNISGPSDDRPYCWHYAPRPCDVVPASTVCGPVYCFTPSPVVIGTTDRRGNPTYTWGENETDVFMLESLRPPTGGWFGCTWMNSTGFTKTCGAPPCQIIPGDYNSSANELLCPTDCFRKHPEATYQRCGSGPWVTPRCLVDYPYRLWHYPCTVNFTVHKVRMFVGGIEHRFDAACNWTRGERCELHDRDRIEMSPLLFSTTQLAILPCSFSTMPALSTGLIHLHQNIVDVQYLYGVSSSVTSWVVKWEYIVLMFLVLADARICTCLWLMLLISNVEA

SEQ ID NO: 1329 - protein, 368 aa, Artificial Sequence
  E2 6b.Th580
TTTVGRAAGRSAYLFTSIFSSGPNQKIQLINTNGSWHINRTALNCIDSLQTGFLSALFYRSNFNSTGCSERLGACKPLEHFQQGWGPITHKSNITGPSEDRPYCWHYAPRECSVVPASSVCGPVYCFTPSPVVVGTTDRLGNPTYNWGENETDVFMLESLRPPQGGWFGCTWMNSTGFTKTCGAPPCQLIPGDYNSSSNQLLCPTDCFRKHPEATYQKCGSGPWLTPRCLVDYPYRLWHYPCTVNYTIHKVRMFIGGVEHRFDAACNWTRGDRCDLYDRDRIEMSPLLFSTTQLAILPCSFTTMPALSTGLIHLHQNIVDVQYLYGVSSSIVSWAVKWEYVVLMFLVLADARICTCLWLMLLVGKVEA

SEQ ID NO: 1330 - protein, 367 aa, Artificial Sequence
  E2 6d.VN.D88
ETYVTGSVTGQTITGFSGLFSSGSQQKLQLVNTNGSWHINRTALNCNDSLQTGFIAALFYTYRFNASGCPARVSSCKPLTYFDQGWGPISYANVSGSSEDKPYCWHYPPRPCGVVPASQVCGPVYCFTPSPVVVGTTDRKGLPTYSWGENESDVFLLESLRPPKGGWYGCTWMNSTGFVKTCGAPPCNIRPDSTGANTTLICPTDCFRKHPEATYAKCGSGPWLTPRCVVDYPYRLWHYPCTQNYTLHKVRMFIGGLEHRFQAACNWTRGDPCNLEDRDRVEMSPLLFSTTELAILPCSFTTMPALSTGLIHLHQNIVDVQYLYGISPSVTSWVIKWEYVVLAFLVLADARICACLWLMLLIGQAEA

SEQ ID NO: 1331 - protein, 367 aa, Artificial Sequence
  E2 6e.CN.GX004
HTHVTGAVAGRTVGNIASLFSPGSRQNLQLINSNGSWHINRTALNCNDSLQTGFIASLFYFNKFNASGCPDRMSSCKPLTYFDQGWGPISYANVSGSSEDKPYCWHYPPRPCGVVPASQVCGPVYCFTPSPVVVGTTDKKGLPTYTWGENESDVFLLESLRPPKGGWYGCTWMNSTGYVKTCGAPPCNIKPDASSSNTTLTCPTDCFRKHPEATYTRCGSGPWLTPRCLVDYPYRLWHYPCTQNYTIHKVRMFVGGLEHRFQAACNWTRGAPCNLDDRDRVEMSPLLFSTTELAILPCSFTTMPALSTGLIHLHQNIVDVQYLYGISPSITSWVIKWEYIVLAFLLLADARICACLWLMLLIGQAEA

SEQ ID NO: 1332 - protein, 363 aa, Artificial Sequence
  E2 6f.TH.C-0046
TTDVAHSAARTTHGIASLFSPGAHQRLQLINSNGSWHINRTALNCNDSLHTGFLANLFYVHKINDSGCPDRMSSCKPLTSFNKGWGPITYATIEGPSSDRPYCWHYAPRPCGVEPAKNVCGPVYCFTPSPVVVGTTDRVGLPTYTWGENETDVFILESVRPPQGGWFGCTWMNSTGFVKTCGAPPCKLGPGTNNSLVCPTDCFRKHPGATYAKCGSGPWLTPRCLVDYPYRLWHYPCTVNFTLHKIRMYVGGVEHRLTAACNWTRGDPCSLGDRDRAELSPLLFSTTELAILPCTFTPMPALSTGLIHLHQNIVDVQYLYGLTPSVVSWSIKWEYLVLAFLVLADARICACLWLMLMIAQVEA

SEQ ID NO: 1333 - protein, 367 aa, Artificial Sequence
  E2 6g.ID.JK046
STYVASSVSQATSGLVSLFSAGARQNLQLINTNGSWHINRTALNCNDSLQTGFIASLFYRNKFNATGCPERLSACKTLDSFDQGWGPITYANISGPAVEKPYCWHYPPRPCEVVSALNVCGPVYCFTPSPVVLGTTDRRGNPTYTWGANETDVFMMSSLRPPAGGWYGCTWMNTSGFVKTCGAPPCNIRPNPEENRTETLRCPTDCFRKHPGATYAKCGSGPWLTPRCLVDYPYRLWHYPCTVNYTLHKVRMYIAGSEHRFTAACNWTRGERCDLADRDRIEMSPLLFSTTELAILPCSFTTMPALSTGLIHLHQNVVDVQYLYGLSTSIVNWAIKWEYVVLLFLVLADSRICLALWLMLLIGQAEA

SEQ ID NO: 1334 - protein, 365 aa, Artificial Sequence
  E2 6k.VN.VN405
TTHIGSSASATTNRLTSFFSPGSKQNVQLIKTNGSWHINRTALNCNDSLHTGFIAGLLYAHRFNSSGCPERLSSCRPLHAFEQGWGPLTYANISGPSNDKPYCWHYPPRPCDIVPARSVCGPVYCFTPSPVVVGTTDRKGLPTYTWGANESDVFLLRSTRPPRGSWFGCTWMNSTGFVKTCGAPPCNTRPVGSGNDTLVCPTDCFRKHPEATYARCGSGPWLTPRCLVNYPYRLWHYPCTVNYTIHKVRMFVGGIEHRFEAACNWTRGERCELDDRDRVEMSPLLFSTTQLSILPCSFTTMPALSTGLIHLHQNIVDVQYLYGVSSAVVSWAVKWEYIVLAFLVLAVARVCACLWLMFLVGQAEA

SEQ ID NO: 1335 - protein, 365 aa, Artificial Sequence
  E2 6m.TH.C-0208
TTGIGYAVSRATSGLTGLFTPGARQNIQLINTNGSWHINRTALNCNDSLQTGFIAGLIYAHKFNSTGCPDRLSWCRSLRSFDQGWGPITYANVSGSSDDRPYCWHYAPRPCTVVPASSVCGPVYCFTPSPVVIGTTDKKGFPTYSWGGNETDVFLLQSARPPRGAWFGCTWMNSTGFVKTCGAPPCNISPPSSSNNSLKCPTDCFRKHPGATYAKCGSGPWLTPRCLVDYPYRLWHYPCTVNYTIHKVRLYLWGIEHRFNAACNWTRGERCELDDRDRIEMSPLLFSTTELSILPCSFTTTPALSTGLIHLHQNVVDVQYLYGLSTAVVSWAVKWEYVVLAFLVLADARICACLWLMFLVGQAEA

SEQ ID NO: 1336 - protein, 364 aa, Artificial Sequence
  E2 6n.CN.KM42
  UNSURE 198: Xaa = unknown
TTYTTGGTAAHSVYGLSTLFTRGSQQNIQLVNSNGSWHVNRTALNCNDSLQTGFIAGLFYYHKFNSSGCLERMSSCKPITLFDQGWGPITYANTSGPSEDRPYCWHYPPRPCGIVPAREVCGPVYCFTPSPVVIGTTDKKGLPTYNWGENMSDVFLLQSARPPRGAWFGCTWMNSTGYVKTCGAPPCNIGPNTNTSLXCPTDCFRKHPDATYSRCGSGPWLTPRCLVDYPYRLWHYPCTINFTIHKVRMFLGGVEHRFSAACNWTRGERCELDDRDRVEMSPLLFSTTELAILPCSFTTMPALSTGLIHLHQNIVDIQYLYGVSTVLVSWAIKWEYVVLAFLVLADARICACMWLMFLVGQAEA

SEQ ID NO: 1337 - protein, 192 aa, Artificial Sequence
  E1 1a.US.H77
YQVRNSSGLYHVTNDCPNSSIVYEAADAILHTPGCVPCVREGNASRCWVAVTPTVATRDGKLPTTQLRRHIDLLVGSATLCSALYVGDLCGSVFLVGQLFTFSPRRHWTTQDCNCSIYPGHITGHRMAWDMMMNWSPTAALVVAQLLRIPQAIMDMIAGAHWGVLAGIAYFSMVGNWAKVLVVLLLFAGVDA

SEQ ID NO: 1338 - protein, 190 aa, Artificial Sequence
  E1 1a.JP.JC-J1
QVRNSTGLYHVTNDCPNSSIVYEAHDAILHTPGCVPCVREGNVSRCWVAMTPTVATRDGKLPATQLRRHIDLLVGSATLCSALYVGDLCGSVFLIGQLFTFSPRRHWTTQGCNCSIYPGHITGHRMAWDMMMNWSPTAALVMAQLLRIPQAILDMIAGAHWGVLAGIAYFSMVGNWAKVLVVLLLFAGVD

SEQ ID NO: 1339 - protein, 187 aa, Artificial Sequence
  E1 1b.KK.HCV-L2
EVRNVSGIYHVTNDCSNSSIVYEAADLIMHTPGCVPCVREANSSRCWVALTPTLAARDSSIPTATIRRHVDLLVGAAAFCSAMYVGDLCGSVFLVSQLFTFSPRLHQTVQDCNCSIYPGHLTGHRMAWDMMMNWSPTAALVVSQLLRIPQAIVDMVAGAHWGVLAGLAYYPMVGNWAKVLIVMLLFA

SEQ ID NO: 1340 - protein, 190 aa, Artificial Sequence
  E1 1c.IN
EVRNSSGIYHVTNDCPNASVVYETDSLIIHLPGCVPCVREGNASRCWVSLSPTVAAKDPGVPVNEIRRHVDLIVGAAAFCSAMYVGDLCGSIFLVGQLFTLSPRRHWTTQDCNCSIYPGHVTGHRMAWDMMMNWSPTGALVVAQLLRIPQAVLDMIAGAHWGVLAGPAYYSMVGNWAKVLVVLLLFAGVD

SEQ ID NO: 1341 - protein, 191 aa, Artificial Sequence
  E1 2a.JP
EVKNTSTGYMVTNDCANSSITWQLHAAVLHVPGCVPCERVDNNTSRCWIPVSPNIAVQRPGALTQGLRSHIDIVVMSATLCSALYVGDLCGGVMLAAQMFVVSPEHHWFVQECNCSIYPGTITGHRMAWDMMMNWSPTATMILAYAMRVPEVIIDIIGGAHWGVMFGLAYFSMQGAWAKVVVILLLAAGVD

SEQ ID NO: 1342 - protein, 190 aa, Artificial Sequence
  E1 2b.JP.MD2b1-2
EVRNISSSYYATNDCSNNSITWQLENAVLHLPGCVPCENDNGTLRCWTQVTPNVAVKHRGALTQHLRTHVDVIVVAATVCSALYVGDVCGAVMIASQALIVSPERHNFTQECNCSIYQGRITGHHMAWDMMLNWSPTITMILAYAARIPELVLEVIFGGHWGVMFGLAYFSMQGAWSKVIVILLLVAGVD

SEQ ID NO: 1343 - protein, 190 aa, Artificial Sequence
  E1 2c.BEBE1
EVRNTSSSYMATNDCSNSSIVWQLEGAVLHTPGCVPCEKTGNKSRCWVPVTPNIAINQPGALTKGLRAHIDVIVMSATLCSALYVGDVCGALMIAAQVVVVSPQHHHFVQECNCSIYPGKITGHRMAWDMMMNWSPTTTMLLAYLVRIPEVVLDIITGGHWGVMFGLAYFSMQGAWAKVVVILLLTAGVE

SEQ ID NO: 1344 - protein, 190 aa, Artificial Sequence
  E1 2i.VN.d54
EVKNTSHIYMVTNDCSNSSITWQLQDAVLHLPGCVPCERVNNESRCWTPVTPNVAVGRPGALTEGLRSHIDIIVASATVCSALYIGDLCGSIMIAAQVVIASPKHHNFVQDCNCSIYPGHVSGHRMAWDMMMNWSPTATMILGYLLRVPEVALEIIAGGHWGVVFGLAYFSMQGAWAKVVVILLLSAGVD

SEQ ID NO: 1345 - protein, 190 aa, Artificial Sequence
  E1 2k.MD.VAT96
EVKNTSQIYMATNDCSNNSITWQLEGAVLHVPGCVPCESTGNISRCWIPVTPNVAVRERGALTKGLRTHIDLIVVSATFCSALYIGDVCGAIMIAAQATIISPQHHTFVQDCNCSIYPGHVTGHRMAWDMMMNWSPATTMIMAYFMRVPEVVLDIITGAHWGVMFGLAYFSMQGAWAKVVVILLLTAGVD

SEQ ID NO: 1346 - protein, 190 aa, Artificial Sequence
  E1 3a.CH.452
EWRNTSGLYVLTNDCPNSSIVYEADDVILHTPGCIPCVQDGNKSTCWTSVTPTVAVKYVGATTASIRSHVDLLVGAATMCSALYVGDMCGAVFLVGQAFTFRPRRHQTVQTCNCSLYPGHLSGHRMAWDMMMNWSPAVGMVVAHVLRLPQTLFDIIAGAHWGILAGLAYYSMQGNWAKVAIIMVMFSGVD

SEQ ID NO: 1347 - protein, 191 aa, Artificial Sequence
  E1 3b.JP.HCV-Tr
EYRNASGLYLLTNDCSNRSIVYEADDVILHLPGCVPCVETDNNNTSCWTPISPTVAVKHPGVTTASIRNHVNMLVAPPTLCSALYVEDAFGAVSLVGQAFTFRPRQHKTVQTCNCSIYPGHVSGHRMAWDMMMNWSPAIGLVISHLMRLPQTFFDLVVGAHWGVMAGLAYFSMQGNWAKVVIVLIMFSGVD

SEQ ID NO: 1348 - protein, 190 aa, Artificial Sequence
  E1 3k.JD.JK049
EYRNASGLYTVTNDCSNGSIVYEAGDVILHLPGCIPCVRLNNASKCWTPVSPTVAVSRPGAATASLRTHVDMMVGAATLCSALYVGDLCGALFLVGQGFSWRHRQHWTVQDCNCSIYPGHLTGHRMAWDMMMNWSPAMTLIVSQVLRLPQTMFDLVIGAHWGVMAGVAYYSMQGNWAKVFLVLCLFSGVD

SEQ ID NO: 1349 - protein, 188 aa, Artificial Sequence
  E1 4a.EG. ED43
RNVSGIYHVTNDCPNSSIVYEADHHIMHLPGCVPCVREGNQSRCWVALTPTVAAPYIGAPLESLRSHVDLMVGAATVCSGLYIGDLCGGLFLVGQMFSFRPRRHWTTQDCNCSIYTGHITGHRMAWDMMMNWSPTTTLVLAQVMRIPTTLVDLLSGGHWGVLVGVAYFSMQANWAKVILVLFLFAGVD

SEQ ID NO: 1350 - protein, 188 aa, Artificial Sequence
  E1 4d.24
RNSSGVYHVTNDCPNSSIVYETEHHILHLPGCVPCVRAGNKSSCWVSLTPTVAAPHLNAPLESLRRHVDLMVGSATLCSALYIGDVCGGAFLVGQLFTFQPRRHWTTQDCNCSIYTGHITGHRMAWDMMMNWSPTTTLVLAQLMRIPSAMVDLLAGGHWGILVGVAYFSMQANWAKVILVLFLFAGVD

SEQ ID NO: 1351 - protein, 187 aa, Artificial Sequence
  E1 4f.FR.IFBT84
NTSGIYHITNDCPNSSIVFEADHHILHLPGCVPCVRTGNRSRCWVALTPTLAAPYAGAPLESMRRHVDLMVGTATLCSALYVGDLCGGIFLVGQMFTFRPRLHWTTQECNCSIYPGHITGHRMAWDMMMNWSPTTALVLAQIMRLPSALVDMLVGGHWGVLAGIAFFSMQANWAKVILILLMFAGVD

SEQ ID NO: 1352 - protein, 188 aa, Artificial Sequence
  E1 5a.ZA.SA13
RNASGVYHVTNDCPNSSIVYEAEDLILHAPGCVPCVRQGNVSRCWVQITPTLSAPSLGAVTAPLRRAVDYLAGGAALCSALYVGDACGAVFLVGQMFTYSPRRHNVVQDCNCSIYSGHITGHRMAWDMMMNWSPTTALVMAQLLRIPQVVIDIIAGAHWGVLFAAAYYASAANWAKVVLVLFLFAGVD

SEQ ID NO: 1353 - protein, 187 aa, Artificial Sequence
  E1 6a.HK.6a33
NSSGLYHLTNDCPNSSIVLEADAMILHLPGCLPCVKVGNQSTCWHAVSPTLAIPNASTPATGFRRHVDLLAGAAVVCSSLYIGDLCGSLFLAGQLFTFQPRRHWTVQECNCSIYTGHVTGHRMAWDMMMSWSPTTTLVLSSILRVPEICASVIFGGHWGILLAVAYFGMAGNWLKVLAVLFLFAGVE

SEQ ID NO: 1354 - protein, 187 aa, Artificial Sequence
  E1 6b.Th580
NSSGLYHLTNDCPRSSIVLEAEAMILHLAGCVPCVRAGNISRCWHPVSPTLAVPNASVPASGFRKHVDLLAGAAVVCSSMYIGDLCGAVFLAGQLATFSPRIHDITQDCNCSVYTGHVTGHRMAWDMMMNWSPTTTLVLSSILRVPEIVLEVFAGGHWGVLIAIAYFGMSGNWLKVIAVLFLFAGVE

SEQ ID NO: 1355 - protein, 187 aa, Artificial Sequence
  E1 6d.VN.D88
NRSGLYHLTNDCPNSSIVYEAPAVIMHLPGCTPCVKVGNQSTCWVSASPTLAVPNASTPLTGFRRHVDLMVGAAAFCSAMYVGDLCGGLFLLGQVITIRPRIHQTVQECNCSIYTGRITGHRMAWDMMMNWSPTATLVVSYAMRVPQLIVDVFVGGHWGVLAGILYYSMVANWAKVIGILLLFAGVE

SEQ ID NO: 1356 - protein, 187 aa, Artificial Sequence
  E1 6e.CN.GX004
  UNSURE 7: Xaa = unknown
NKSGLYXLTNDCPNSSIVYEAPAVIMHLPGCTPCVKVGNHSTCWLPASPTLAVPNASTPLTGFRKHVDLMVGAAAFCSAMYVGDICGGLFLLGQVVTIRPRIHQTVQECNCSIYTGRISGHRMAWDMMMNWSPLVTLIASYAMRVPQLIVDIFVGGHWGVLAGILYYSMVANWAKVIGILLLFAGVE

SEQ ID NO: 1357 - protein, 187 aa, Artificial Sequence
  E1 6f.TH.C-0046
NRSDIYQLTNDCPNSSIVYEAESMILHLPGCVPCVMTGNQSRCWVPASPTLAVPNASAPLTGFRKHVDLMVGAAAFCSAMYVGDLCGGVFLVGQLFTFRPRLHHTVQDCNCSVYVGHITGHRMAWDMMMNWSPTAGLIVSYALRVPELIMDIFVGGHWGVLGALLYYSMVANWAKVIAVLILFAGVE

SEQ ID NO: 1358 - protein, 187 aa, Artificial Sequence
  E1 6g.ID.JK046
NKSGIYHLTNDCPNSSMVYEAEAIILHLPGCVPCIRTGNQSRCWTPATPTLAIPNSTVPASGFRQHIDLMVGAAALCSAMYLGDLCGGVFLVGQLFTFRPRIHQTVQDCNCSIYTGHVTGHRMAWDMMMNWSPTATFVVSSALRAPQVLFDIFAGGHWGIIGALLYYSTAANWAKVIIVLLLFAGVD

SEQ ID NO: 1359 - protein, 188 aa, Artificial Sequence
  E1 6k.VN.VN405
RNISGIYHLTNDCPNSSIIYEADNIIMHTPGCVPCVKTGNKSQCWVPVAPTLAVANASVPIRGFRSHVDLLVGSAAACSALYIGDLCGGVFLVGQLFTFRPRQHTTVQECNCSIYTGHITGHRMAWDMMMNWSPTVTFITSSLLRVPQLLLEIALEGHWGVIGALLYYSMVANWAKVFAVLLLFAGVD

SEQ ID NO: 1360 - protein, 188 aa, Artificial Sequence
  E1 6m.TH.C-0208
KNISGIYHLTNDCPNSSIVYEAGDIILHLPGCVPCVTTGNTSQCWVPVSPTLAVKDVMTSPKGFRTHVDLMVGAAAFCSALYIGDLCGGVFLVGQLFTFRPRVHQTTQDCNCSIYTGHITGHRMAWDMMMNWSPSAAYLASAVLRLPQLLLDIFLEGHWGVIGAILYYSMVGNWAKVLAVLLLFAGVD

SEQ ID NO: 1361 - protein, 184 aa, Artificial Sequence
  E1 6n.CN.KM42
  UNSURE 3: Xaa = unknown
RNXTGIYHLTNDCPNSSIVYEADTMILHLPGCVPCVRAGNGSRCWVPVSPTLAVPNASVPARGFRTHVDLLVGSAALCSALYVGDLCGGVFLVGQLLAFRPRTHHTTQDCTCSIYTGHVTGHRMAWDMMMNWSPTAAYAISALLRVPQLLLEVVLEGHWGVLGALLYYSMVANWAKVLAVLLLF

SEQ ID NO: 1362 - protein, 103 aa, Artificial Sequence
  Heavy chain CH1
ASTKGPSVFPLAPSSKSTSGGTAALGCLVKDYFPEPVTVSWNSGALTSGVHTFPAVLQSSGLYSLSSVVTVPSSSLGTQTYICNVNHKPSNTKVDKKVEPKSC

SEQ ID NO: 1363 - protein, 227 aa, Artificial Sequence
  Heavy chain hinge-CH2-CH3
DKTHTCPPCPAPELLGGPSVFLFPPKPKDTLMISRTPEVTCVVVDVSHEDPEVKFNWYVDGVEVHNAKTKPREEQYNSTYRVVSVLTVLHQDWLNGKEYKCKVSNKALPAPIEKTISKAKGQPREPQVYTLPPSRDELTKNQVSLTCLVKGFYPSDIAVEWESNGQPENNYKTTPPVLDSDGSFFLYSKLTVDKSRWQQGNVFSCSVMHEALHNHYTQKSLSLSPGK

SEQ ID NO: 1364 - protein, 105 aa, Artificial Sequence [sequence omitted]

SEQ ID NO: 1365 - protein, 108 aa, Artificial Sequence; identical to SEQ ID NO: 1017
  B6c Light Chain

1-164. (canceled)

165. An antibody or antigen-binding fragment thereof, wherein:
the antibody or antigen-binding fragment thereof selectively binds to the hepatitis C virus (HCV) E1E2 complex;
the antibody or antigen-binding fragment thereof does not bind to a purified E2 polypeptide that is not in an E1E2 complex;
the antibody or antigen-binding fragment thereof does not bind to a linear epitope on the HCV E1 polypeptide; and
the antibody or antigen-binding fragment thereof neutralizes at least 2 isolates of hepatitis C virus.

166. The antibody or antigen-binding fragment thereof of claim 165, comprising
a variable heavy chain (V_{H}) complementary determining region (CDR) CDR1 comprising a sequence of amino acids set forth in any of SEQ ID NOS: 725-741, 983 and 1090-1091 or a sequence having at least 70%, 80%, 90%, 91%, 92%, 93%, 94%, 95%, 96%, 97%, 98%, 99% or more sequence identity thereto;
a V_{H} CDR2 having a sequence of amino acids set forth in any of SEQ ID NOS: 742-759 and 1092-1096 or a sequence having at least 70%, 80%, 90%, 91%, 92%, 93%, 94%, 95%, 96%, 97%, 98%, 99% or more sequence identity thereto; and
a V_{H} CDR3 comprising a sequence of amino acids set forth in any of SEQ ID NOS: 760-777 and 1097-1100 or a sequence having at least 70%, 80%, 90%, 91%, 92%, 93%, 94%, 95%, 96%, 97%, 98%, 99% or more sequence identity thereto.

167. The antibody or antigen-binding fragment thereof of claim 165, comprising
a V_{H} CDR1 comprising a sequence of amino acids set forth in SEQ ID NO:727 or a sequence having at least 70%, 80%, 90%, 91%, 92%, 93%, 94%, 95%, 96%, 97%, 98%, 99% or more sequence identity thereto, a V_{H} CDR2 comprising a sequence of amino acids set forth in SEQ ID NO:745 or a sequence having at least 70%, 80%, 90%, 91%, 92%, 93%, 94%, 95%, 96%, 97%, 98%, 99% or more sequence identity thereto, and a V_{H} CDR3 comprising a sequence of amino acids set forth in SEQ ID NO:763 or a sequence having at least 70%, 80%, 90%, 91%, 92%, 93%, 94%, 95%, 96%, 97%, 98%, 99% or more sequence identity thereto; or
a V_{H} CDR1 comprising a sequence of amino acids set forth in SEQ ID NO:725 or a sequence having at least 70%, 80%, 90%, 91%, 92%, 93%, 94%, 95%, 96%, 97%, 98%, 99% or more sequence identity thereto, a V_{H} CDR2 comprising a sequence of amino acids set forth in SEQ ID NO:742 or a sequence having at least 70%, 80%, 90%, 91%, 92%, 93%, 94%, 95%, 96%, 97%, 98%, 99% or more sequence identity thereto, and a V_{H} CDR3 comprising a sequence of amino acids set forth in SEQ ID NO:760 or a sequence having at least 70%, 80%, 90%, 91%, 92%, 93%, 94%, 95%, 96%, 97%, 98%, 99% or more sequence identity thereto; or
a V_{H} CDR1 comprising a sequence of amino acids set forth in SEQ ID NO:730 or a sequence having at least 70%, 80%, 90%, 91%, 92%, 93%, 94%, 95%, 96%, 97%, 98%, 99% or more sequence identity thereto, a V_{H} CDR2 comprising a sequence of amino acids set forth in SEQ ID NO:748 or a sequence having at least 70%, 80%, 90%, 91%, 92%, 93%, 94%, 95%, 96%, 97%, 98%, 99% or more sequence identity thereto, and a V_{H} CDR3 comprising a sequence of amino acids set forth in SEQ ID NO:766 or a sequence having at least 70%, 80%, 90%, 91%, 92%, 93%, 94%, 95%, 96%, 97%, 98%, 99% or more sequence identity thereto; or
a V_{H} CDR1 comprising a sequence of amino acids set forth in SEQ ID NO:741 or a sequence having at least 70%, 80%, 90%, 91%, 92%, 93%, 94%, 95%, 96%, 97%, 98%, 99% or more sequence identity thereto, a V_{H} CDR2 comprising a sequence of amino acids set forth in SEQ ID NO:759 or a sequence having at least 70%, 80%, 90%, 91%, 92%, 93%, 94%, 95%, 96%, 97%, 98%, 99% or more sequence identity thereto, and a V_{H} CDR3 comprising a sequence of amino acids set forth in SEQ ID NO:777 or a sequence having at least 70%, 80%, 90%, 91%, 92%, 93%, 94%, 95%, 96%, 97%, 98%, 99% or more sequence identity thereto; or
a V_{H} CDR1 comprising a sequence of amino acids set forth in SEQ ID NO:726 or a sequence having at least 70%, 80%, 90%, 91%, 92%, 93%, 94%, 95%, 96%, 97%, 98%, 99% or more sequence identity thereto, a V_{H} CDR2 comprising a sequence of amino acids set forth in SEQ ID NO:743 or a sequence having at least 70%, 80%, 90%, 91%, 92%, 93%, 94%, 95%, 96%, 97%, 98%, 99% or more sequence identity thereto, and a V_{H} CDR3 comprising a sequence of amino acids set forth in SEQ ID NO:761 or a sequence having at least 70%, 80%, 90%, 91%, 92%, 93%, 94%, 95%, 96%, 97%, 98%, 99% or more sequence identity thereto; or
a V_{H} CDR1 comprising a sequence of amino acids set forth in SEQ ID NO:983 or a sequence having at least 70%, 80%, 90%, 91%, 92%, 93%, 94%, 95%, 96%, 97%, 98%, 99% or more sequence identity thereto, a V_{H} CDR2 comprising a sequence of amino acids set forth in SEQ ID NO:744 or a sequence having at least 70%, 80%, 90%, 91%, 92%, 93%, 94%, 95%, 96%, 97%, 98%, 99% or more sequence identity thereto, and a V_{H} CDR3 comprising a sequence of amino acids set forth in SEQ ID NO:762 or a sequence having at least 70%, 80%, 90%, 91%, 92%, 93%, 94%, 95%, 96%, 97%, 98%, 99% or more sequence identity thereto; or
a V_{H} CDR1 comprising a sequence of amino acids set forth in SEQ ID NO:733 or a sequence having at least 70%, 80%, 90%, 91%, 92%, 93%, 94%, 95%, 96%, 97%, 98%, 99% or more sequence identity thereto, a V_{H} CDR2 comprising a sequence of amino acids set forth in SEQ ID NO:751 or a sequence having at least 70%, 80%, 90%, 91%, 92%, 93%, 94%, 95%, 96%, 97%, 98%, 99% or more sequence identity thereto, and a V_{H} CDR3 comprising a sequence of amino acids set forth in SEQ ID NO:769 or a sequence having at least 70%, 80%, 90%, 91%, 92%, 93%, 94%, 95%, 96%, 97%, 98%, 99% or more sequence identity thereto; or
a V_{H} CDR1 comprising a sequence of amino acids set forth in SEQ ID NO:735 or a sequence having at least 70%, 80%, 90%, 91%, 92%, 93%, 94%, 95%, 96%, 97%, 98%, 99% or more sequence identity thereto, a V_{H} CDR2 comprising a sequence of amino acids set forth in SEQ ID NO:753 or a sequence having at least 70%, 80%, 90%, 91%, 92%, 93%, 94%, 95%, 96%, 97%, 98%, 99% or more sequence identity thereto, and a V_{H} CDR3 comprising a sequence of amino acids set forth in SEQ ID NO:771 or a sequence having at least 70%, 80%, 90%, 91%, 92%, 93%, 94%, 95%, 96%, 97%, 98%, 99% or more sequence identity thereto; or
a V_{H} CDR1 comprising a sequence of amino acids set forth in SEQ ID NO:738 or a sequence having at least 70%, 80%, 90%, 91%, 92%, 93%, 94%, 95%, 96%, 97%, 98%, 99% or more sequence identity thereto, a V_{H} CDR2 comprising a sequence of amino acids set forth in SEQ ID NO:756 or a sequence having at least 70%, 80%, 90%, 91%, 92%, 93%, 94%, 95%, 96%, 97%, 98%, 99% or more sequence identity thereto, and a V_{H} CDR3 comprising a sequence of amino acids set forth in SEQ ID NO:774 or a sequence having at least 70%, 80%, 90%, 91%, 92%, 93%, 94%, 95%, 96%, 97%, 98%, 99% or more sequence identity thereto; or
a V_{H} CDR1 comprising a sequence of amino acids set forth in SEQ ID NO:728 or a sequence having at least 70%, 80%, 90%, 91%, 92%, 93%, 94%, 95%, 96%, 97%, 98%, 99% or more sequence identity thereto, a V_{H} CDR2 comprising a sequence of amino acids set forth in SEQ ID NO:746 or a sequence having at least 70%, 80%, 90%, 91%, 92%, 93%, 94%, 95%, 96%, 97%, 98%, 99% or more sequence identity thereto, and a V_{H} CDR3 comprising a sequence of amino acids set forth in SEQ ID NO:764 or a sequence having at least 70%, 80%, 90%, 91%, 92%, 93%, 94%, 95%, 96%, 97%, 98%, 99% or more sequence identity thereto; or
a V_{H} CDR1 comprising a sequence of amino acids set forth in SEQ ID NO:729 or a sequence having at least 70%, 80%, 90%, 91%, 92%, 93%, 94%, 95%, 96%, 97%, 98%, 99% or more sequence identity thereto, a V_{H} CDR2 comprising a sequence of amino acids set forth in SEQ ID NO:747 or a sequence having at least 70%, 80%, 90%, 91%, 92%, 93%, 94%, 95%, 96%, 97%, 98%, 99% or more sequence identity thereto, and a V_{H} CDR3 comprising a sequence of amino acids set forth in SEQ ID NO:765 or a sequence having at least 70%, 80%, 90%, 91%, 92%, 93%, 94%, 95%, 96%, 97%, 98%, 99% or more sequence identity thereto; or
a V_{H} CDR1 comprising a sequence of amino acids set forth in SEQ ID NO:731 or a sequence having at least 70%, 80%, 90%, 91%, 92%, 93%, 94%, 95%, 96%, 97%, 98%, 99% or more sequence identity thereto, a V_{H} CDR2 comprising a sequence of amino acids set forth in SEQ ID NO:749 or a sequence having at least 70%, 80%, 90%, 91%, 92%, 93%, 94%, 95%, 96%, 97%, 98%, 99% or more sequence identity thereto, and a V_{H} CDR3 comprising a sequence of amino acids set forth in SEQ ID NO:767 or a sequence having at least 70%, 80%, 90%, 91%, 92%, 93%, 94%, 95%, 96%, 97%, 98%, 99% or more sequence identity thereto; or
a V_{H} CDR1 comprising a sequence of amino acids set forth in SEQ ID NO:732 or a sequence having at least 70%, 80%, 90%, 91%, 92%, 93%, 94%, 95%, 96%, 97%, 98%, 99% or more sequence identity thereto, a V_{H} CDR2 comprising a sequence of amino acids set forth in SEQ ID NO:750 or a sequence having at least 70%, 80%, 90%, 91%, 92%, 93%, 94%, 95%, 96%, 97%, 98%, 99% or more sequence identity thereto, and a V_{H} CDR3 comprising a sequence of amino acids set forth in SEQ ID NO:768 or a sequence having at least 70%, 80%, 90%, 91%, 92%, 93%, 94%, 95%, 96%, 97%, 98%, 99% or more sequence identity thereto; or
a V_{H} CDR1 comprising a sequence of amino acids set forth in SEQ ID NO:734 or a sequence having at least 70%, 80%, 90%, 91%, 92%, 93%, 94%, 95%, 96%, 97%, 98%, 99% or more sequence identity thereto, a V_{H} CDR2 comprising a sequence of amino acids set forth in SEQ ID NO:752 or a sequence having at least 70%, 80%, 90%, 91%, 92%, 93%, 94%, 95%, 96%, 97%, 98%, 99% or more sequence identity thereto, and a V_{H} CDR3 comprising a sequence of amino acids set forth in SEQ ID NO:770 or a sequence having at least 70%, 80%, 90%, 91%, 92%, 93%, 94%, 95%, 96%, 97%, 98%, 99% or more sequence identity thereto; or
a V_{H} CDR1 comprising a sequence of amino acids set forth in SEQ ID NO:736 or a sequence having at least 70%, 80%, 90%, 91%, 92%, 93%, 94%, 95%, 96%, 97%, 98%, 99% or more sequence identity thereto, a V_{H} CDR2 comprising a sequence of amino acids set forth in SEQ ID NO:754 or a sequence having at least 70%, 80%, 90%, 91%, 92%, 93%, 94%, 95%, 96%, 97%, 98%, 99% or more sequence identity thereto, and a V_{H} CDR3 comprising a sequence of amino acids set forth in SEQ ID NO:772 or a sequence having at least 70%, 80%, 90%, 91%, 92%, 93%, 94%, 95%, 96%, 97%, 98%, 99% or more sequence identity thereto; or
a V_{H} CDR1 comprising a sequence of amino acids set forth in SEQ ID NO:737 or a sequence having at least 70%, 80%, 90%, 91%, 92%, 93%, 94%, 95%, 96%, 97%, 98%, 99% or more sequence identity thereto, a V_{H} CDR2 comprising a sequence of amino acids set forth in SEQ ID NO:755 or a sequence having at least 70%, 80%, 90%, 91%, 92%, 93%, 94%, 95%, 96%, 97%, 98%, 99% or more sequence identity thereto, and a V_{H} CDR3 comprising a sequence of amino acids set forth in SEQ ID NO:773 or a sequence having at least 70%, 80%, 90%, 91%, 92%, 93%, 94%, 95%, 96%, 97%, 98%, 99% or more sequence identity thereto; or
a V_{H} CDR1 comprising a sequence of amino acids set forth in SEQ ID NO:739 or a sequence having at least 70%, 80%, 90%, 91%, 92%, 93%, 94%, 95%, 96%, 97%, 98%, 99% or more sequence identity thereto, a V_{H} CDR2 comprising a sequence of amino acids set forth in SEQ ID NO:757 or a sequence having at least 70%, 80%, 90%, 91%, 92%, 93%, 94%, 95%, 96%, 97%, 98%, 99% or more sequence identity thereto, and a V_{H} CDR3 comprising a sequence of amino acids set forth in SEQ ID NO:775 or a sequence having at least 70%, 80%, 90%, 91%, 92%, 93%, 94%, 95%, 96%, 97%, 98%, 99% or more sequence identity thereto; or
a V_{H} CDR1 comprising a sequence of amino acids set forth in SEQ ID NO:740 or a sequence having at least 70%, 80%, 90%, 91%, 92%, 93%, 94%, 95%, 96%, 97%, 98%, 99% or more sequence identity thereto, a V_{H} CDR2 comprising a sequence of amino acids set forth in SEQ ID NO:758 or a sequence having at least 70%, 80%, 90%, 91%, 92%, 93%, 94%, 95%, 96%, 97%, 98%, 99% or more sequence identity thereto, and a V_{H} CDR3 comprising a sequence of amino acids set forth in SEQ ID NO:776 or a sequence having at least 70%, 80%, 90%, 91%, 92%, 93%, 94%, 95%, 96%, 97%, 98%, 99% or more sequence identity thereto.

168. The antibody or antigen-binding fragment thereof of claim 165 that is an antigen-binding fragment selected from among a single-chain Fv (scFv), Fab, Fab′, F(ab′)₂, Fv, dsFv, diabody, Fd and a Fd′ fragment.

169. The antibody or antigen-binding fragment thereof of claim 165, comprising (1) a variable light chain (V_{L}) CDR1 with a sequence of amino acids set forth in any of SEQ ID NOS:778-796 and 1101-1113 or a sequence having at least 70%, 80%, 90%, 91%, 92%, 93%, 94%, 95%, 96%, 97%, 98%, 99% or more sequence identity thereto; (2) a V_{L} CDR2 with a sequence of amino acids set forth in any of SEQ ID NOS:797-815 and 1114-1121 or a sequence having at least 70%, 80%, 90%, 91%, 92%, 93%, 94%, 95%, 96%, 97%, 98%, 99% or more sequence identity thereto; and (3) a V_{L} CDR3 with a sequence of amino acids set forth in any of SEQ ID NOS:816-834 and 1122-1133 or a sequence having at least 70%, 80%, 90%, 91%, 92%, 93%, 94%, 95%, 96%, 97%, 98%, 99% or more sequence identity thereto.

170. The antibody or antigen-binding fragment thereof of claim 165, comprising a heavy chain, wherein the heavy chain comprises a sequence of amino acids set forth in any of SEQ ID NOS:986-1004 or 1062-1075.

171. The antibody or antigen-binding fragment thereof of claim 165, comprising a light chain, wherein the light chain comprises a sequence of amino acids set forth in any of SEQ ID NOS:1005-1023 or 1076-1089.

172. The antibody or antigen-binding fragment thereof of claim 165, comprising:
a V_{H} CDR1 having a sequence of amino acids set forth in SEQ ID NO:727;
a V_{H} CDR2 having a sequence of amino acids set forth in SEQ ID NO:745;
a V_{H} CDR3 having a sequence of amino acids set forth in SEQ ID NO:763;
a V_{L} CDR1 having a sequence of amino acids set forth in SEQ ID NO:781;
a V_{L} CDR2 having a sequence of amino acids set forth in SEQ ID NO:800; and
a V_{L} CDR3 having a sequence of amino acids set forth in SEQ ID NO:819.

173. The antibody or antigen-binding fragment thereof of claim 165, comprising
a heavy chain having a sequence of amino acids set forth SEQ ID NO:989; and
a light chain having a sequence of amino acids set forth SEQ ID NO:1008.

174. An antibody or antigen-binding fragment thereof that selectively binds to the same epitope as that which is selectively bound by the antibody or antigen-binding fragment thereof of claim 165.

175. A method for detecting hepatitis C virus in a sample, comprising:
contacting the sample with an antibody or antigen-binding fragment of claim 165; and
determining whether the antibody binds specifically to the sample, wherein the binding of the antibody to the sample indicates that the sample contains a hepatitis C virus.

176. A method for treating or preventing hepatitis C viral infection in a mammal susceptible to infection by a hepatitis C virus, comprising administering to the mammal an effective amount of an antibody or antigen-binding fragment of claim 165.

177. An isolated nucleic acid molecule that encodes the antibody or antigen-binding fragment of claim 165.

178. An expression vector, comprising the nucleic acid molecule of claim 177.

179. A cell comprising the expression vector of claim 178.

180. A polypeptide, comprising at least one CDR sequence that contains a sequence of amino acids selected from among any set forth in any of SEQ ID NOS: 725-834, 985 and 1090-1133; or a sequence having at least 70%, 80%, 90%, 91%, 92%, 93%, 94%, 95%, 96%, 97%, 98%, 99% or more sequence identity with a sequence of amino acids set forth in any of SEQ ID NOS: 725-834 and 1090-1133, and that, when in an antibody or antigen-binding fragment thereof, the antibody or antigen-binding fragment selectively binds to E1, E1/E2 complex and/or to an HCV virion.

181. The polypeptide of claim 180 that has two CDR sequences, wherein the first CDR (CDR1) sequence has an amino acid sequence set forth in any of SEQ ID NOS: 725-741, 778-796, 985, 1090-1091 and 1101-1113; and the second CDR (CDR2) sequence has an amino acid sequence set forth in any of SEQ ID NOS: 742-759, 797-815, 1092-1096 and 1114-1121.

182. The polypeptide of claim 180 that has three CDR sequences, wherein the first CDR1 sequence has an amino acid sequence set forth in any of SEQ ID NOS: 725-741, 778-796, 985, 1090-1091 or 1101-1113; the second CDR2 sequence has an amino acid sequence set forth in any of SEQ ID NOS: 742-759, 797-815, 1092-1096 and 1114-1121; and the third CDR (CDR3) sequence has an amino acid sequence set forth in any of SEQ ID NOS: 760-777, 816-834, 1097-1100 and 1122-1133.

183. The polypeptide of claim 180, further comprising a framework sequence, wherein the framework sequence has a sequence of amino acids set forth in any of SEQ ID NOS:835-982 and 1134-1205.

184. The polypeptide of claim 180, comprising two framework sequences, wherein:
the first framework (framework-1) sequence, from the N-terminus of the polypeptide, has a sequence of amino acids set forth in any of SEQ ID NOS: 835-852, 907-925, 1134-1143 and 1165-1173; and
the second framework (framework-2) sequence, from the N-terminus of the polypeptide, has a sequence of amino acids set forth in any of SEQ ID NOS: 853-870, 926-944, 1144-1147, and 1174-1181.

185. The polypeptide of claim 180, comprising three framework sequences, wherein:
the framework-1 sequence, from the N-terminus of the polypeptide, has a sequence of amino acids set forth in any of SEQ ID NOS: 835-852, 907-925, 1134-1143 and 1165-1173;
the framework-2 sequence, from the N-terminus of the polypeptide, has a sequence of amino acids set forth in any of SEQ ID NOS: 853-870, 926-944, 1144-1147, and 1174-1181; and
the third framework sequence (framework-3), from the N-terminus of the polypeptide, has a sequence of amino acids set forth in any of SEQ ID NOS: 871-888, 945-963, 1148-1156 and 1182-1193.

186. The polypeptide of claim 180, comprising four framework sequences, wherein:
the framework-1 sequence, from the N-terminus of the polypeptide, has a sequence of amino acids set forth in any of SEQ ID NOS: 835-852, 907-925, 1134-1143 and 1165-1173;
the framework-2 sequence, from the N-terminus of the polypeptide, has a sequence of amino acids set forth in any of SEQ ID NOS: 853-870, 926-944, 1144-1147, and 1174-1181;
the framework-3 sequence, from the N-terminus of the polypeptide, has a sequence of amino acids set forth in any of SEQ ID NOS: 871-888, 945-963, 1148-1156 and 1182-1193; and
the fourth framework (framework-4) sequence, from the N-terminus of the polypeptide, has a sequence of amino acids set forth in any of SEQ ID NOS: 889-906, 964-982, 1157-1164, and 1194-1205.

187. The polypeptide of claim 180 that has a sequence of amino acids set forth in any of SEQ ID NOS: 986-1023, 1062-1089 and 1365.
